(19) United States
(12) Patent Application Publication
(10) Pub. No.: US 2019/0046594 A1
(43) Pub. Date: Feb. 14, 2019

(54) HSV-1 ONCOLYTIC VIRUS THERAPIES THAT SPECIFICALLY KILL ALT DEPENDENT CANCERS

(71) Applicant: Salk Institute for Biological Studies, La Jolla, CA (US)

(72) Inventors: Clodagh O'Shea, San Diego, CA (US); Jason DeHart, San Diego, CA (US)

(73) Assignee: Salk Institute for Biological Studies, La Jolla, CA (US)

(21) Appl. No.: 16/169,421

(22) Filed: Oct. 24, 2018

Related U.S. Application Data
(63) Continuation of application No. PCT/US2017/029683, filed on Apr. 26, 2017.
(60) Provisional application No. 62/327,596, filed on Apr. 26, 2016.

(51) Int. Cl. A61K 35/763; A61P 35/00; C12N 15/63

(52) U.S. Cl. CPC A61K 35/763; A61K 45/06; C12N 15/63; A61P 35/00

(57) ABSTRACT

Recombinant herpes simplex virus (HSV)-1 capable of selectively replicating in alternative lengthening of telomeres (ALT)-dependent tumor cells are described. The recombinant HSV-1 are ICP0-deficient, such as by complete deletion of the ICP0 gene, or mutation of the ICP0 gene sufficient to diminish or eliminate E3 ubiquitin ligase activity of ICP0. In some cases, the recombinant HSV-1 further include additional gene deletions or mutations, such as those that render the virus glycoprotein C (gC) deficient, or include a heterologous gene, such as a gene encoding an immunostimulatory molecule. Methods of treating ALT-dependent cancer, and methods of selectively killing ALT-dependent tumor cells are also described.

### CROSS REFERENCE TO RELATED APPLICATIONS

[0001] This application is a continuation of International Application No. PCT/US2017/029683, filed Apr. 26, 2017, published in English under PCT Article 21(2), which claims the benefit of U.S. Provisional Application No. 62/327,596, filed Apr. 26, 2016. The above-listed applications are herein incorporated by reference in their entirety.

### FIELD

[0002] This disclosure concerns recombinant herpes simplex viruses that specifically replicate in alternative lengthening of telomeres (ALT)-dependent cancer cells and their use for the treatment of ALT-dependent cancer.

### BACKGROUND

[0003] Telomeres are specialized DNA repeats at the ends of chromosomes that are replicated by the telomerase enzyme complex. In almost all normal cells with the exception of stem cells, telomerase activity is shut off. As a consequence, telomeres become progressively shorter with every round of cellular DNA replication. When telomeres become critically short, they trigger a cellular DNA damage response that induces irreversible replicative arrest (Shay et al., Science 336, 1388-1390, 2012). Thus, telomere shortening is a critical tumor suppressor mechanism that limits the number of times a cell can replicate and divide.

[0004] Cancer cells have limitless replicative potential due to their ability to elongate and maintain their telomeres through one of two mutually exclusive mechanisms. In the majority of human cancers, human telomerase reverse transcriptase (hTERT) is upregulated. However, in approximately 10% of human cancers, telomere length is maintained through a homologous recombination-based mechanism known as the alternative lengthening of telomeres (ALT) (Cesare and Reddel, Nat Rev Genet 11, 319-330, 2010). The strict dependence of replication on telomere maintenance makes it an attractive target for cancer therapy. However, treatment of mouse tumor models with telomerase inhibitors leads to a switch and outgrowth of ALT-dependent tumors (Hu et al., Cell 148, 651-663, 2012). Therefore, if targeting of telomere maintenance is going to be a viable cancer therapeutic option, it is imperative to be able to target telomerase as well as ALT-dependent cancers. Despite nearly two decades since the identification of ALT, there are currently no rational targets or therapies for ALT-dependent tumors.

### SUMMARY

[0005] Provided herein are methods of treating an alternative lengthening of telomeres (ALT)-dependent cancer in a subject. The methods can include selecting a subject having an ALT-dependent cancer; and administering to the subject a recombinant herpes simplex virus (HSV)-1 that is infected cell protein 0 (ICP0)-deficient, glycoprotein C (gC)-deficient, or both ICP0-deficient and gC-deficient, thereby treating the ALT-dependent cancer in the subject. In some embodiments, the ICP0-deficient HSV-1 has a disruption in the ICP0 gene that diminishes or eliminates expression of functional ICP0. In some examples, the disruption in the ICP0 gene includes a complete deletion of the ICP0 gene, a partial deletion of the ICP0 gene, an insertion in the ICP0 gene and/or a point mutation in the ICP0 gene. In some embodiments, the HSV-1 has a modification of the gC gene that diminishes or eliminates expression of gC, or that results in expression of a truncated gC. In some cases, the recombinant HSV-1 includes disruptions in one or more additional viral genes or includes a heterologous gene, such as a gene encoding an immunostimulatory molecule.

[0006] Also provided herein is a recombinant HSV-1 having a complete deletion of the ICP0 gene, and a heterologous gene encoding granulocyte-macrophage colony-stimulating factor (GM-CSF). Further provided is a recombinant HSV-1 having a complete deletion of the ICP0 gene, a partial deletion of the ICP47 gene, and a heterologous gene encoding GM-CSF. Use of the recombinant viruses for the treatment of ALT-dependent cancer is also provided by the present disclosure.

[0007] The foregoing and other objects and features of the disclosure will become more apparent from the following detailed description, which proceeds with reference to the accompanying figures.

### BRIEF DESCRIPTION OF THE DRAWINGS

[0008] FIGS. 1A-1G: (FIG. 1A) Model for the restriction of herpes simplex virus (HSV)-1 replication by promyelocytic leukemia (PML) nuclear bodies (NBs). (FIG. 1B) BJ cells were infected with the indicated virus and incubated for 24 hours post-infection (hpi). Cells were fixed and stained for HSV infected cell polypeptide 4 (ICP4) and PML and the edge of newly forming plaques was imaged on a Zeis LSM 780 confocal microscope at 63× magnification. The viral protein ICP4 marks incoming viral genomes and shows co-localization between PML NBs and viral genomes in the absence of infection cell polypeptide 0 (ICP0). Scale bar is 10 μm. (FIG. 1C) Model for the role of PML NBs in ALT cells. (FIG. 1D) Immunofluorescence-fluorescence in situ hybridization (IF-FISH) of U2OS cells for telomeric C-rich repeats, which are labeled with a peptide nucleic acid (PNA)-TelC FISH probe and anti-PML antibody. Scale bar is 10 μm. (FIG. 1E) 1E5 BJ cells were infected with either HSV-1 wild-type (WT) or HSV-1 ΔICP0 at the indicated multiplicity of infection (MOI) and incubated for 36-48 hours. Plates were stained with crystal violet and plaques were counted. Wells that were completely lysed were considered to have had 100% infection. (FIG. 1F) Plaque assay of U2OS cells infected with HSV-1 WT or HSV-1 ΔICP0 and analyzed as above. (FIG. 1G) U2OS cells were infected with HSV-1 ΔICP0 or left uninfected. At 36-48 hpi, cells were fixed and hybridized with the PNA TelC FISH probe followed by IF staining for PML and ICP4. Cells were imaged at 63× on Zeiss LSM 780 confocal microscope. Scale bar is 10 μm.

[0009] FIGS. 2A-2J: (FIG. 2A) Primary small airway epithelial cells (SAEC) were infected with HSV-1 ΔICP0 or HSV-1 WT virus at an MOI=1. At 8 hpi, RNA was collected and subjected to RNA sequencing. Differentially expressed genes between HSV-1 ΔICP0 and HSV-1 WT infected cells are plotted on a volcano plot with those genes that are significantly upregulated in the absence of ICP0 shown to the right of the double vertical lines and those significantly downregulated in the absence of ICP0 shown to the left of the double vertical lines. Significance was determined by a p-value≤0.05 and Log 2 fold change≥0.8 or ≤−0.8. (FIG. 2B) A hypergeometric test was performed using MSigDB to calculate the overlap between the hallmark gene set from MSigDB and those genes significantly upregulated in the absence of ICP0. The top ten overlapping pathways are shown with corresponding p-value. (FIG. 2C) Overlap between the curated gene sets in MSigDB and those genes upregulated in the absence of ICP0. The top ten overlapping pathways are shown with corresponding p-value. (FIG. 2D) The ALT cell line U2OS were infected with HSV-1 ΔICP0 or HSV-1 WT at an MOI=1. At 12 hpi, RNA was collected and subjected to microarray analysis on an affymetrix human Genechip 1.0 ST array. Differentially expressed genes were plotted on a volcano plot with the significantly upregulated genes shown on the upper right and significantly downregulated genes shown on the upper left. Significance was determined by a p-value≤0.05 and Log 2 fold change≥0.8 or ←0.8. (FIG. 2E) Venn diagram showing overlap between the genes significantly suppressed by ICP0 in SAEC and U2OS cells. (FIG. 2F and FIG. 2G) SAOS2 (ALT) and SKBR3 (ALT) cells were infected and RNA from these cells was analyzed by microarray as described for U2OS cells. (FIG. 2H and FIG. 2J) The telomerase positive cell lines HOS and SJSA1 were infected at MOI=1 with HSV-1 ΔICP0 or WT. RNA was collected 12 hpi and analyzed by microarray. Differentially expressed genes are plotted as a volcano plot. Significance was determined by a p-value≤0.05 and Log 2 fold change≥0.58 or ≤−0.58 for HOS and Log 2 fold change≥1 or ≤−1 for SJSA1 cells. (FIG. 2I) Overlap between the hallmark gene set from MSigDB and those genes upregulated in the absence of ICP0. The top ten overlapping pathways are shown with corresponding p-value.

[0010] FIGS. 3A-3D: (FIG. 3A) Indicated cells were treated with varying amounts of recombinant interferon (IFN)-α for 4 hours at which point RNA was harvested from the cells. Fold change relative to the untreated control for indicated genes was determined by reverse transcriptase-quantitative polymerase chain reaction (RT-qPCR) using the ΔΔCq method and GAPDH for normalization. Error bars represent the standard error of the mean (SEM). (FIG. 3B) Cells were transfected with an empty plasmid, sheared calf thymus DNA or transfection reagent only and incubated for 6 hours. RNA was collected and fold change relative to untransfected cells was determined by RT-qPCR. (FIG. 3C) HOS or U2OS cells were infected with HSV-1 WT or HSV-1 ΔICP0 at an MOI=1 for 4 hours following which RNA was collected and analyzed by RT-QPCR. (FIG. 4D) HOS or U2OS cells were transfected with 2 μg of PolyI:C or empty plasmid. At 4 hours post-transfection, RNA was harvested and subjected to RT-qPCR using 18s for normalization.

[0011] FIGS. 4A-4B: (FIG. 4A) Indicated cells were plated in 24 well plates and infected in duplicate with either HSV-1 WT or HSV-1 ΔICP0 at an experimentally determined MOI that would yield ˜30 plaques/well in the HSV-1 WT infected wells. At 36-48 hours post-infection, cells were stained with crystal violet and plaques were counted. The average number of plaques in ΔICP0 infected cells divided by the average number of plaques in WT infected cells was calculated to yield the replication efficiency of HSV-1 ΔICP0 relative to HSV-1 WT in the indicated cell type, which was then normalized to 100%. Error bars represent standard deviation (SD). (FIG. 4B) A model representing the required cellular changes for a cell to transition to ALT. These changes phenocopy HSV-1 ICP0 activity, which subsequently rescues replication of an ICP0-deleted HSV-1.

[0012] FIGS. 5A-5B: (FIG. 5A) BJ cells were transfected with the indicated siRNA. At 48 hours post-transfection, cells were harvested for RNA to monitor knock down efficiency of PML, ATRX or DAXX. Fold-change relative to siControl transfected BJ cells was determined by RT-qPCR using the ΔΔCq method and GAPDH as a normalizer. (FIG. 5B) BJ cells were transfected with indicated siRNA. At 48 hours post-transfection, cells were infected with HSV-1 ΔICP0 or HSV-1 WT and a plaque assay was performed.

[0013] FIGS. 6A-6B: (FIG. 6A) Full panel of cells screened for sensitivity to IFN-α treatment as described in FIG. 3. Shown from left to right for each dose of IFNα is the transcriptional induction of IFIT1, IFIT2, IFIT3, MX1, OAS1 and OAS2 and MX1. (FIG. 6B) Full panel of cells transfected with empty plasmid DNA of calf thymus DNA as described in FIG. 3. Shown from left to right for each type of DNA is induction of IFIT1, IFIT2, IFIT3, MX1, OAS1 and OAS2 and MX1 mRNA.

[0014] FIGS. 7A-7E: Oncolytic HSV-1 administration to nude mice harboring xenograft tumors stably transduced with a lentiviral vector expressing a CMV promoter-driven luciferase reporter gene. (FIG. 7A) Tumor cell viability, as measured by luciferase activity, following administration of HSV-1 WT and HSV-1 ΔICP0 to mice harboring SAOS2 (ALT-dependent) tumor cells. Virus was administered at Day 0 (5×10⁵ PFU), Day 3 (5×10⁵ PFU) and Day 8 (1×10⁶ PFU). (FIG. 7B) Tumor volume following administration of HSV-1 WT and HSV-1 ΔICP0 to mice harboring SAOS2 (ALT-dependent) tumor cells. Virus was administered at Day 0 (5×10⁵ PFU), Day 3 (5×10⁵ PFU) and Day 8 (1×10⁶ PFU). (FIG. 7C) Tumor cell viability following administration of HSV-1 WT and HSV-1 ΔICP0 to mice harboring SAOS2 (ALT-dependent) tumor cells. Virus was administered at Day 0 (5×10⁵ PFU), Day 3 (5×10⁵ PFU) and Day 5 (1×10⁶ PFU). (FIG. 7D) Tumor volume following administration of HSV-1 WT and HSV-1 ΔICP0 to mice harboring SAOS2 (ALT-dependent) tumor cells. Virus was administered at Day 0 (5×10⁵ PFU), Day 4 (5×10⁵ PFU) and Day 8 (1×10⁶ PFU). (FIG. 7E) Tumor cell viability following administration of HSV-1 WT and HSV-1 ΔICP0 to mice harboring A549 (Tel+) tumor cells. Virus was administered at Day 0 (5×10⁵ PFU), Day 3 (5×10⁵ PFU) and Day 7 (1×10⁶ PFU).

[0015] FIG. 8: Schematic diagrams of HSV-1 WT, HSV-1 ΔICP0 GM-CSF and HSV-1 ΔICP0/ΔICP47 GM-CSF.

[0016] FIG. 9A-9B: Indicated cells were plated in 24 well plates and infected in duplicate with either HSV-1 WT or HSV-1 ΔICP0. At 36-48 hours post-infection, cells were stained with crystal violet and plaques were counted. The average number of plaques in ΔICP0 infected cells divided by the average number of plaques in WT infected cells was calculated to yield the relative plaque forming efficiency of HSV-1 ΔICP0 relative to HSV-1 WT in the indicated cell type, which was then normalized to 100%. Error bars represent standard deviation (SD). FIG. 9A shows ALT cell line SJRH30 in comparison with U2OS. FIG. 9B shows ALT cell line G292 in comparison with U2OS.

[0017] FIG. 10 shows the sequence analysis of the HSV-1 gC gene from parental HSV-1 WT (strain 17) and HSV-1 ΔICP0 (strain d11403). Nucleotide alignment of a fragment of the gC gene between HSV-1 WT (SEQ ID NO: 17) and HSV-1 ΔICP0 (SEQ ID NO: 18) is shown. Deletion is indicated by “-”. Numbering of nucleotides is indicated at the top. Also shown is the alignment of gC proteins based on DNA sequence results. The underlined HSV-1 ΔICP0 gC sequence has no homology to the wild type gC protein (WT: SEQ ID NO: 19 from amino acid 60-70, SEQ ID NO: 20 from amino acid 171-180; d11403: SEQ ID NO: 21 from amino acid 60-70, SEQ ID NO: 22 from amino acid 171-174). Stop codon is indicated by “*”. Numbering of amino acids is indicated above the sequences.

### SEQUENCE LISTING

[0018] The nucleic and amino acid sequences listed in the accompanying sequence listing are shown using standard letter abbreviations for nucleotide bases, and three letter code for amino acids, as defined in 37 C.F.R. 1.822. Only one strand of each nucleic acid sequence is shown, but the complementary strand is understood as included by any reference to the displayed strand. The Sequence Listing is submitted as an ASCII text file, created on Oct. 15, 2018, 773 KB, which is incorporated by reference herein. In the accompanying sequence listing:

[0019] SEQ ID NO: 1 is the nucleotide sequence of the IFIT1 forward primer.

[0020] SEQ ID NO: 2 is the nucleotide sequence of the IFIT1 reverse primer.

[0021] SEQ ID NO: 3 is the nucleotide sequence of the IFIT2 forward primer.

[0022] SEQ ID NO: 4 is the nucleotide sequence of the IFIT2 reverse primer.

[0023] SEQ ID NO: 5 is the nucleotide sequence of the IFIT3 forward primer.

[0024] SEQ ID NO: 6 is the nucleotide sequence of the IFIT3 reverse primer.

[0025] SEQ ID NO: 7 is the nucleotide sequence of the OAS1 forward primer.

[0026] SEQ ID NO: 8 is the nucleotide sequence of the OAS1 reverse primer.

[0027] SEQ ID NO: 9 is the nucleotide sequence of the OAS2 forward primer.

[0028] SEQ ID NO: 10 is the nucleotide sequence of the OAS2 reverse primer.

[0029] SEQ ID NO: 11 is the nucleotide sequence of the MX1 forward primer.

[0030] SEQ ID NO: 12 is the nucleotide sequence of the MX1 reverse primer.

[0031] SEQ ID NO: 13 is the nucleotide sequence of the GAPDH forward primer.

[0032] SEQ ID NO: 14 is the nucleotide sequence of the GAPDH reverse primer.

[0033] SEQ ID NO: 15 is the nucleotide sequence of HSV-1 ΔICP0 GM-CSF.

[0034] SEQ ID NO: 16 is the nucleotide sequence of HSV-1 ΔICP0/ΔICP47 GM-CSF.

[0035] SEQ ID NO: 17 is the HSV-1 WT glycoprotein C (gC) nucleotide 181-200 sequence.

[0036] SEQ ID NO: 18 is the HSV-1 strain d11403 gC nucleotide 181-199 sequence.

[0037] SEQ ID NO: 19 is the HSV-1 WT gC amino acid 60-70 sequence.

[0038] SEQ ID NO: 20 is the HSV-1 strain d11403 gC amino acid 60-70 sequence.

[0039] SEQ ID NO: 21 is the HSV-1 WT gC amino acid 171-180 sequence.

[0040] SEQ ID NO: 22 is the HSV-1 strain d11403 amino acid 171-174 sequence.

[0041] SEQ ID NO: 23 is the nucleotide sequence of HSV-1 ΔICP0/ΔgC GM-CSF.

[0042] SEQ ID NO: 24 is the nucleotide sequence of HSV-1 ΔICP0/ΔICP47/ΔgC GM-CSF.

### DETAILED DESCRIPTION

### I. Abbreviations

[0043] ALT alternative lengthening of telomeres
[0044] APB ALT-associated PML NB
[0045] ECTR extrachromosomal telomeric repeat
[0046] hpi hours post-infection
[0047] HSV herpes simplex virus
[0048] FISH fluorescence in situ hybridization
[0049] GBM glioblastoma multiforme
[0050] ICP0 Infected cell protein 0
[0051] ICP4 infected cell protein 4
[0052] IF immunofluorescence
[0053] IFN interferon
[0054] ISG interferon stimulated gene
[0055] MOI multiplicity of infection
[0056] NB nuclear body
[0057] PML promyelocytic leukemia
[0058] PNA peptide nucleic acid
[0059] RT-qPCR reverse transcriptase-quantitative polymerase chain reaction
[0060] SAEC small airway epithelial cells
[0061] SD standard deviation
[0062] SEM standard error of the mean
[0063] TERT telomerase reverse transcriptase
[0064] TMM telomere maintenance mechanism
[0065] VECTR viral and extrachromosomal DNA transcriptional response
[0066] WT wild-type

### II. Terms and Methods

[0067] Unless otherwise noted, technical terms are used according to conventional usage. Definitions of common terms in molecular biology may be found in Benjamin Lewin, Genes V, published by Oxford University Press, 1994 (ISBN 0-19-854287-9); Kendrew et al. (eds.), The Encyclopedia of Molecular Biology, published by Blackwell Science Ltd., 1994 (ISBN 0-632-02182-9); and Robert A. Meyers (ed.), Molecular Biology and Biotechnology: a Comprehensive Desk Reference, published by VCH Publishers, Inc., 1995 (ISBN 1-56081-569-8).

[0068] In order to facilitate review of the various embodiments of the disclosure, the following explanations of specific terms are provided:

[0069] Administration: To provide or give a subject an agent, such as a therapeutic agent (e.g. an oncolytic virus), by any effective route. Exemplary routes of administration include, but are not limited to, injection (such as subcutaneous, intramuscular, intradermal, intraperitoneal, intratumoral, and intravenous), oral, intraductal, sublingual, rectal, transdermal, intranasal, vaginal and inhalation routes.

[0070] Alternative lengthening of telomeres (ALT): A mechanism used by mammalian cells for maintaining telomeres. Approximately 10% of tumors use ALT as a telomere maintenance mechanism (TMM), while the majority of cancers are dependent on telomerase to maintain telomere length.

[0071] ALT-dependent cancer: Any type of cancer that relies on ALT for maintaining telomeres. In some embodiments, the ALT-dependent cancer is characterized as being telomerase-negative, having extrachromosomal telomeric repeat (ECTR) DNA, having altered PML bodies, permissive for infection by ICP0-deficient HSV-1 and/or having a VECTR-deficient response. In some embodiments herein, the ALT-dependent cancer is a soft tissue sarcoma, such as but not limited to, a pleomorphic sarcoma, a fibrosarcoma, a leiomyosarcoma, a liposarcoma, an angiosarcoma, an epithelioid sarcoma or a chondrosarcoma. In other embodiments, the ALT-dependent cancer is a cancer of the central nervous system, such as but not limited to an astrocytoma (for example, a diffuse astrocytoma or an anaplastic astrocytoma), glioblastoma multiforme (GBM), an oligodendroglioma, or a medulloblastoma (including anaplastic and non-anaplastic medulloblastoma). In other embodiments, the ALT-dependent cancer is an osteosarcoma.

[0072] Chemotherapeutic agent: Any chemical agent with therapeutic usefulness in the treatment of diseases characterized by abnormal cell growth. Such diseases include tumors, neoplasms, and cancer. In one embodiment, a chemotherapeutic agent is a radioactive compound. In one embodiment, a chemotherapeutic agent is a biologic, such as a therapeutic monoclonal antibody. One of skill in the art can readily identify a chemotherapeutic agent of use (see for example, Slapak and Kufe, Principles of Cancer Therapy, Chapter 86 in Harrison's Principles of Internal Medicine, 14th edition; Perry et al., Chemotherapy, Ch. 17 in Abeloff, Clinical Oncology 2^{nd} ed., © 2000 Churchill Livingstone, Inc; Baltzer, L., Berkery, R. (eds.): Oncology Pocket Guide to Chemotherapy, 2nd ed. St. Louis, Mosby-Year Book, 1995; Fischer, D. S., Knobf, M. F., Durivage, H. J. (eds): The Cancer Chemotherapy Handbook, 4th ed. St. Louis, Mosby-Year Book, 1993). Combination chemotherapy is the administration of more than one agent to treat cancer. One example is the administration of an oncolytic virus used in combination with a radioactive or chemical compound.

[0073] Deficient: As used herein, “ICP0-deficient” or “deficient in ICP0” refers to a recombinant virus having a disruption in the ICP0 gene (such as one or more nucleotide insertions, deletions, point mutations, or combinations thereof), which results in a substantial decrease in, or the absence of, functional ICP0 protein. Similarly, “gC-deficient” or “deficient in gC” refers to a recombinant virus having a disruption in the gC gene (such as one or more nucleotide insertions, deletions, point mutations, or combinations thereof), which results in a substantial decrease in, or the absence of, functional gC protein. The HSV-1 genome contains two copies of the ICP0 gene and two copies of the gC gene, therefore an ICP0-deficient virus has a disruption of both copies of the ICP0 gene, and a gC-deficient virus has a disruption of both copies of the gC gene. However, it is not necessary for both copies of the ICP0 gene or the gC gene to have the same type of disruption. For example, one copy of the ICP0 (or gC) gene could be deleted (such as completely deleted), while the second copy could contain a point mutation that prevents expression of functional ICP0 (or gC) protein. Similarly, the recombinant viruses disclosed herein may be deficient in other genes, such as ICP34.5, ICP6 or ICP47, caused by a disruption in the gene. As used herein, the term “diminishes or eliminates expression” of functional protein (such as ICP0, gC, ICP34.5, ICP6 or ICP47 protein) does not refer to only a complete loss of expression, but also includes a decrease, in some cases a substantial decrease, in expression of functional protein, such as a decrease of about 50%, about 60%, about 70%, about 80%, about 90%, about 95%, about 98% or about 99%.

[0074] Disruption: As used herein, a “disruption” in a gene refers to any insertion, deletion or point mutation, or any combination thereof. In some embodiments, the disruption leads to a partial or complete loss of expression of mRNA and/or functional protein.

[0075] Glycoprotein C (gC): An HSV attachment protein that mediates binding of the virus to cell surface heparan sulfate or chondroitin sulfate. gC is further described as Uniprot P10228. Viral entry of HSV involves viral envelope proteins, glycoprotein C, glycoprotein B, which bind to heparan sulfate. Glycoprotein D is also involved as viral entry and binds to other entry receptors. The HSV-1 gC protein is encoded by the UL44 gene.

[0076] Herpes simplex virus (HSV)-1: A member of the Alphaherpesvirinae subfamily of the Herpesviridae family. Herpesviruses have a linear, double-stranded DNA genome that circularizes upon infection. The genome is contained within an icosahedral capsid, which is surrounded by a lipid envelope. The genome of HSV-1 is relatively complex and contains two unique regions, called the long unique region (U_{L}) and the short unique region (Us), and includes two pairs of inverted repeat regions, TR_{L}/IR_{L} and IR_{S}/TR_{S} (see FIG. 8).

[0077] Heterologous: Originating from a separate genetic source or species.

[0078] Immunostimulatory molecule: Proteins that function to enhance an immune response. Examples of immunostimulatory molecules include, but are not limited to, granulocyte-macrophage colony-stimulating factor (GM-CSF), C-C motif chemokine ligand 5 (CCL5), C-C motif chemokine ligand 1 (CCL1), interleukin (IL)-12 and B7.1.

[0079] Infected cell protein 0 (ICP0): An HSV-1 immediate early (IE) phosphoprotein that functions as a transactivator of viral and cellular genes. ICP0 is important for the progression to lytic infection and for reactivation from latency. This protein includes a RING finger domain with E3 ubiquitin ligase activity. ICP0 is also a minor structural component of the tegument layer of HSV-1 particles. The ICP0 gene is present in two copies within the HSV-1 genome, one copy in each of the TR_{L} and IR_{L} inverted repeat regions. ICP0 is further described as UniProt P08393. The amino acid sequence of ICP0 is found in GenBank Accession No. AEQ77030.1.

[0080] Infected cell protein 6 (ICP6): A protein encoded by HSV-1 that functions as a ribonucleoside-diphosphate reductase holoenzyme. ICP6, which is also known as ribonucleoside-diphosphate reductase large subunit, is encoded by the UL39 gene. In the context of the present disclosure, the term “ICP6 gene” is used to refer to the gene encoding the ICP6 protein. ICP6 is further described as UniProt P08543.

[0081] Infected cell protein 34.5 (ICP34.5): A protein encoded by HSV-1 that contributes to HSV resistance to the antiviral effects of α/β interferon. ICP34.5 also down-regulates host MHC class II proteins and acts as a neurovirulence factor. ICP34.5 is encoded by the RL1 gene. In the context of the present disclosure, the term “ICP34.5 gene” is used to refer to the gene encoding the ICP34.5 protein. ICP0 is further described as UniProt P36313.

[0082] Infected cell protein 47 (ICP47): A protein encoded by HSV-1 that inhibits the MHC class I pathway in host cells by preventing binding of antigen to TAP. ICP47 is encoded by the US12 gene. In the context of the present disclosure, the term “ICP47 gene” is used to refer to the gene encoding the ICP47 protein. ICP0 is further described as UniProt P03170.

[0083] Isolated: An “isolated” biological component, such as a nucleic acid, protein (including antibodies) or organelle, has been substantially separated or purified away from other biological components in the environment (such as a cell) in which the component naturally occurs, i.e., other chromosomal and extra-chromosomal DNA and RNA, proteins and organelles. Nucleic acids and proteins that have been “isolated” include nucleic acids and proteins purified by standard purification methods. The term also embraces nucleic acids and proteins prepared by recombinant expression in a host cell as well as chemically synthesized nucleic acids.

[0084] Modification: A change in the sequence of a nucleic acid or protein sequence. For example, amino acid sequence modifications include, for example, substitutions, insertions and deletions, or combinations thereof. Insertions include amino and/or carboxyl terminal fusions as well as intrasequence insertions of single or multiple amino acid residues. Deletions are characterized by the removal of one or more amino acid residues from the protein sequence. In some embodiments herein, the modification (such as a substitution, insertion or deletion) results in a change in function, such as a reduction or enhancement of a particular activity of a protein. As used herein, “Δ” or “delta” refer to a deletion. Substitutional modifications are those in which at least one residue has been removed and a different residue inserted in its place. Amino acid substitutions are typically of single residues, but can occur at a number of different locations at once. Substitutions, deletions, insertions or any combination thereof may be combined to arrive at a final mutant sequence. These modifications can be prepared by modification of nucleotides in the DNA encoding the protein, thereby producing DNA encoding the modification. Techniques for making insertion, deletion and substitution mutations at predetermined sites in DNA having a known sequence are well known in the art. A “modified” protein, nucleic acid or virus is one that has one or more modifications as outlined above.

[0085] Neoplasia, malignancy, cancer or tumor: A neoplasm is an abnormal growth of tissue or cells that results from excessive cell division. Neoplastic growth can produce a tumor. The amount of a tumor in an individual is the “tumor burden” which can be measured as the number, volume, or weight of the tumor. A tumor that does not metastasize is referred to as “benign.” A tumor that invades the surrounding tissue and/or can metastasize is referred to as “malignant.”

[0086] Oncolytic virus: A virus that selectively kills cells of a proliferative disorder, e.g., cancer/tumor cells. Killing of the cancer cells can be detected by any method established in the art, such as determining viable cell count, or detecting cytopathic effect, apoptosis, or synthesis of viral proteins in the cancer cells (e.g., by metabolic labeling, immunoblot, or RT-PCR of viral genes necessary for replication), or reduction in size of a tumor.

[0087] Operably linked: A first nucleic acid sequence is operably linked with a second nucleic acid sequence when the first nucleic acid sequence is placed in a functional relationship with the second nucleic acid sequence. For instance, a promoter is operably linked to a coding sequence if the promoter affects the transcription or expression of the coding sequence. Generally, operably linked DNA sequences are contiguous and, where necessary to join two protein-coding regions, in the same reading frame.

[0088] Pharmaceutical agent: A chemical compound or composition capable of inducing a desired therapeutic or prophylactic effect when properly administered to a subject or a cell.

[0089] Pharmaceutically acceptable carriers: The pharmaceutically acceptable carriers of use are conventional. Remington's Pharmaceutical Sciences, by E. W. Martin, Mack Publishing Co., Easton, Pa., 15th Edition, 1975, describes compositions and formulations suitable for pharmaceutical delivery of the therapeutic recombinant viruses disclosed herein.

[0090] In general, the nature of the carrier will depend on the particular mode of administration being employed. For instance, parenteral formulations usually comprise injectable fluids that include pharmaceutically and physiologically acceptable fluids such as water, physiological saline, balanced salt solutions, aqueous dextrose, glycerol or the like as a vehicle. For solid compositions (such as powder, pill, tablet, or capsule forms), conventional non-toxic solid carriers can include, for example, pharmaceutical grades of mannitol, lactose, starch, or magnesium stearate. In addition to biologically neutral carriers, pharmaceutical compositions to be administered can contain minor amounts of non-toxic auxiliary substances, such as wetting or emulsifying agents, preservatives, and pH buffering agents and the like, for example sodium acetate or sorbitan monolaurate.

[0091] Preventing, treating or ameliorating a disease: “Preventing” a disease refers to inhibiting the full development of a disease. “Treating” refers to a therapeutic intervention that ameliorates a sign or symptom of a disease or pathological condition after it has begun to develop, such as a reduction in tumor burden (such as the volume or size of a tumor) or a decrease in the number of size of metastases. “Ameliorating” refers to the reduction in the number or severity of signs or symptoms of a disease, such as cancer.

[0092] Purified: The term purified does not require absolute purity; rather, it is intended as a relative term. Thus, for example, a purified peptide preparation is one in which the peptide or protein is more enriched than the peptide or protein is in its natural environment within a cell. In one embodiment, a preparation is purified such that the protein or peptide represents at least 50% of the total peptide or protein content of the preparation. Substantial purification denotes purification from other proteins or cellular components. A substantially purified protein is at least 60%, 70%, 80%, 90%, 95% or 98% pure. Thus, in one specific, non-limiting example, a substantially purified protein is 90% free of other proteins or cellular components.

[0093] Recombinant: A recombinant nucleic acid molecule, protein or virus is one that has a sequence that is not naturally occurring or has a sequence that is made by an artificial combination of two otherwise separated segments of sequence. This artificial combination can be accomplished by chemical synthesis or by the artificial manipulation of isolated segments of nucleic acid molecules, such as by genetic engineering techniques. The term “recombinant” also includes nucleic acids, proteins and viruses that have been altered solely by addition, substitution, or deletion of a portion of the natural nucleic acid molecule, protein or virus.

[0094] Sequence identity: The similarity between amino acid or nucleic acid sequences is expressed in terms of the similarity between the sequences, otherwise referred to as sequence identity. Sequence identity is frequently measured in terms of percentage identity (or similarity or homology); the higher the percentage, the more similar the two sequences are. Homologs or variants of a polypeptide or nucleic acid molecule will possess a relatively high degree of sequence identity when aligned using standard methods.

[0095] Methods of alignment of sequences for comparison are well known in the art. Various programs and alignment algorithms are described in: Smith and Waterman, Adv. Appl. Math. 2:482, 1981; Needleman and Wunsch, J. Mol. Biol. 48:443, 1970; Pearson and Lipman, Proc. Natl. Acad. Sci. U.S.A. 85:2444, 1988; Higgins and Sharp, Gene 73:237, 1988; Higgins and Sharp, CABIOS 5:151, 1989; Corpet et al., Nucleic Acids Research 16:10881, 1988; and Pearson and Lipman, Proc. Natl. Acad. Sci. U.S.A. 85:2444, 1988. Altschul et al., Nature Genet. 6:119, 1994, presents a detailed consideration of sequence alignment methods and homology calculations.

[0096] The NCBI Basic Local Alignment Search Tool (BLAST) (Altschul et al., J. Mol. Biol. 215:403, 1990) is available from several sources, including the National Center for Biotechnology Information (NCBI, Bethesda, Md.) and on the internet, for use in connection with the sequence analysis programs blastp, blastn, blastx, tblastn and tblastx. A description of how to determine sequence identity using this program is available on the NCBI website on the internet.

[0097] Homologs and variants of an antibody that specifically binds a target antigen or a fragment thereof are typically characterized by possession of at least about 75%, for example at least about 80%, 90%, 95%, 96%, 97%, 98% or 99% sequence identity counted over the full length alignment with the amino acid sequence of the antibody using the NCBI Blast 2.0, gapped blastp set to default parameters. For comparisons of amino acid sequences of greater than about 30 amino acids, the Blast 2 sequences function is employed using the default BLOSUM62 matrix set to default parameters, (gap existence cost of 11, and a per residue gap cost of 1). When aligning short peptides (fewer than around 30 amino acids), the alignment should be performed using the Blast 2 sequences function, employing the PAM30 matrix set to default parameters (open gap 9, extension gap 1 penalties). Proteins with even greater similarity to the reference sequences will show increasing percentage identities when assessed by this method, such as at least 80%, at least 85%, at least 90%, at least 95%, at least 98%, or at least 99% sequence identity. When less than the entire sequence is being compared for sequence identity, homologs and variants will typically possess at least 80% sequence identity over short windows of 10-20 amino acids, and may possess sequence identities of at least 85% or at least 90% or 95% depending on their similarity to the reference sequence. Methods for determining sequence identity over such short windows are available at the NCBI website on the internet. One of skill in the art will appreciate that these sequence identity ranges are provided for guidance only; it is entirely possible that strongly significant homologs could be obtained that fall outside of the ranges provided.

[0098] Subject: Living multi-cellular vertebrate organisms, a category that includes both human and veterinary subjects, including human and non-human mammals.

[0099] Synthetic: Produced by artificial means in a laboratory, for example a synthetic nucleic acid or protein can be chemically synthesized in a laboratory.

[0100] Therapeutically effective amount: A quantity of a specific substance sufficient to achieve a desired effect in a subject being treated. For instance, this can be the amount necessary to inhibit or suppress growth or metastasis of a tumor. In one embodiment, a therapeutically effective amount is the amount necessary to eliminate, reduce the size, or prevent metastasis of a tumor. When administered to a subject, a dosage will generally be used that will achieve target tissue concentrations (for example, in tumors) that has been shown to achieve a desired in vitro effect.

[0101] Unless otherwise explained, all technical and scientific terms used herein have the same meaning as commonly understood by one of ordinary skill in the art to which this disclosure belongs. The singular terms “a,” “an,” and “the” include plural referents unless context clearly indicates otherwise. “Comprising A or B” means including A, or B, or A and B. It is further to be understood that all base sizes or amino acid sizes, and all molecular weight or molecular mass values, given for nucleic acids or polypeptides are approximate, and are provided for description. Although methods and materials similar or equivalent to those described herein can be used in the practice or testing of the present disclosure, suitable methods and materials are described below. All publications, patent applications, patents, and other references mentioned herein are incorporated by reference in their entirety. In case of conflict, the present specification, including explanations of terms, will control. In addition, the materials, methods, and examples are illustrative only and not intended to be limiting.

### III. Introduction

[0102] Cellular immortality is a hallmark of cancer that distinguishes tumor cells from normal cells. When a normal somatic cell divides, telomeric DNA at the ends of its chromosomes becomes shorter. If telomeres shorten too much, an alarm signal is generated, and the cell permanently stops dividing and enters senescence or undergoes apoptosis. Telomere shortening therefore acts as a biological mechanism for limiting cellular life span. Cancer cells, on the other hand, can become immortalized by activating a telomere maintenance mechanism (TMM) that counteracts telomere shortening by synthesizing new telomeric DNA from either an RNA template using the enzyme telomerase or a DNA template using a mechanism called alternative lengthening of telomeres (ALT). Because the presence of a TMM is a nearly universal characteristic of cancer cells, and repressing these mechanisms results in cancer cell senescence or death, TMMs have become targets for treating cancer. However, there are currently no ALT-targeted cancer therapies.

[0103] It is disclosed herein that the generation of extrachromosomal telomeric repeat (ECTR) DNA in ALT resembles HSV-1 viral genomes and triggers a similar protective response that prevents both viral and tumor replication. This novel anti-viral/anti-tumor DNA immune response signature is referred to herein as the “Viral and Extrachromosomal DNA Transcriptional Response (VECTR).” VECTR triggers immune effectors that protect the host from extrachromosomal viral and cellular DNA. It is further disclosed herein that the VECTR response is inactivated specifically in ALT-dependent, but not telomerase-dependent cancers. This finding led to the prediction that ICP0-null, and/or glycoprotein C (gC) deficient HSV-1 viruses would replicate specifically in cancer cells, but leave normal cells unharmed. To test this, wild-type, gC deficient and ICP0-null HSV-1 virus replication and killing were compared in a panel of telomerase-positive tumors, ALT tumors and normal cells. The results demonstrated that HSV-1 ICP0-null, gC deficient viruses replicate specifically in ALT-dependent cancers. The studies disclosed herein indicate that HSV-1 ICP0-null and/or gC deficient viruses can be used as a selective therapy for treating ALT-dependent cancers.

### IV. Overview of Several Embodiments

[0104] Provided herein are methods of treating an ALT-dependent cancer in a subject. The method includes administering to the subject a recombinant, ICP0-deficient HSV-1. In some embodiments, the method further includes selecting a subject having an ALT-dependent cancer. In some embodiments, the ICP0-deficient HSV-1 has a disruption in the ICP0 gene that diminishes or eliminates expression of functional ICP0. In some examples, the disruption in the ICP0 gene includes a complete deletion of the ICP0 gene, a partial deletion of the ICP0 gene, an insertion in the ICP0 gene, a point mutation in the ICP0 gene, or any combination thereof. The HSV-1 genome includes two copies of the ICP0 gene, a first copy in TR_{L} and a second copy in IR_{L}. In the context of the present disclosure, an ICP0-deficient virus has a disruption of both copies of the ICP0 gene. However, it is not necessary for both copies of the ICP0 gene to have the same type of disruption. As one non-limiting example, one copy of the ICP0 gene can be completely deleted, while the second copy can contain a point mutation, partial deletion or insertion that prevents expression of functional ICP0 protein.

[0105] In some embodiments, the recombinant ICP0-deficient HSV-1 includes a complete deletion of the ICP0 gene. In particular examples, the recombinant HSV-1 includes a complete deletion of both copies of the ICP0 gene.

[0106] In some embodiments, the recombinant ICP0-deficient HSV-1 includes a partial deletion in the ICP0 gene. In particular examples, the partial deletion in the ICP0 gene is in the RING finger domain coding region.

[0107] In some embodiments, the recombinant ICP0-deficient HSV-1 includes an insertion or a point mutation in the ICP0 gene. In particular examples, the insertion or point mutation in the ICP0 gene is in the RING finger domain coding region.

[0108] In some embodiments, the partial deletion, insertion or point mutation in the ICP0 gene diminishes or eliminates E3 ubiquitin ligase activity of ICP0.

[0109] Nonsense mutations at codon 212, 428, 525, and 680 of the ICP0 gene of HSV-1 result in a replication-defective virus that is rescued by U2OS cells. Therefore, mutations in the ICP0 gene up to codon 680 that result in a truncated, functionally inactive, ICP0 protein are contemplated herein. In addition, the RING finger domain within ICP0 has been shown to be important for ICP0 function. Therefore, mutations that disrupt the function of the RING finger domain, thereby resulting in functional inactivation of ICP0, are further contemplated. One such ICP0 mutation that has been previously described is the FxE mutant (Everett et al., J Gen Virol 70:1185-1202, 1989; Everett et al., J Virol 78(4):1763-1774, 2004).

[0110] In some embodiments, the recombination HSV-1 is glycoprotein C (gC) deficient. In a particular example, the recombinant HSV-1 has a gC gene with a deletion of the cytosine at position 186 relative to the gC gene of wild-type HSV-1. In a particular example, the recombinant HSV-1 includes a gC gene with a premature termination at the 175^{th} codon of Gc relative to the gC gene of wild-type HSV-1. In a particular example, the recombinant HSV-1 includes the mutations shown in FIG. 10, in association with HSV-1 strain d11403. These mutations include a deletion of the cytosine at position 186, and a premature termination at codon 175 (as described in Cunha, et al. Widely used Herpes Simplex Virus 1 ICP0 Deletion Mutant Strain d11403 and its Derivative Viruses Do Not Express Glycoprotein C Due to a Secondary Mutation in the gC gene. PLOS one. Jul. 17, 2015., incorporated by reference herein). In some embodiments, the HSV-1 has a modification of the gC gene that diminishes or eliminates expression of gC, or that results in expression of a truncated gC.

[0111] In some embodiments, the recombination HSV-1 is both ICP0-deficient and gC deficient.

[0112] In some embodiments, the recombinant HSV-1 (which can be ICP0-deficient, gC deficient, or both) includes a heterologous gene. In some examples, the heterologous gene encodes an immunostimulatory molecule. In particular examples, the immunostimulatory molecule is granulocyte-macrophage colony-stimulating factor (GM-CSF), C-C motif chemokine ligand 5 (CCL5), C-C motif chemokine ligand 1 (CCL1), interleukin (IL)-12 or B7.1.

[0113] In some embodiments, the recombinant ICP0-deficient HSV-1 further includes a disruption in one or more additional HSV-1 genes that diminishes or eliminates expression of functional protein encoded by the gene(s). In some examples, the recombinant virus further includes a disruption in the ICP47 gene. In some examples, recombinant virus further includes a disruption in the ICP6 gene. In some examples, recombinant virus further includes a disruption in the ICP34.5 gene. The disruption in the ICP47, ICP6 and/or ICP34.5 genes can be a complete deletion, a partial deletion, a point mutation, an insertion, or any combination thereof.

[0114] In particular non-limiting embodiments, the recombinant ICP0-deficient HSV-1 includes a complete deletion of the ICP0 gene and includes a heterologous gene encoding GM-CSF. In some examples, the recombinant HSV-1 has a genome sequence at least 80%, at least 85%, at least 90%, at least 95%, at least 96%, at least 97%, at least 98%, or at least 99% identical to SEQ ID NO: 15. In specific examples, the genome sequence of the recombinant HSV-1 comprises or consists of SEQ ID NO: 15.

[0115] In other particular non-limiting embodiments, the recombinant ICP0-deficient HSV-1 includes a complete deletion of the ICP0 gene, a partial deletion of the ICP47 gene, and includes a heterologous gene encoding GM-CSF. In some examples, the recombinant HSV-1 has a genome sequence at least 80%, at least 85%, at least 90%, at least 95%, at least 96%, at least 97%, at least 98%, or at least 99% identical to SEQ ID NO: 16. In specific examples, the genome sequence of the recombinant HSV-1 comprises or consists of SEQ ID NO: 16.

[0116] In particular non-limiting embodiments, the recombinant ICP0-deficient HSV-1 includes a complete deletion of the ICP0 gene, a mutation in the gC gene (such that it is gC deficient), and includes a heterologous gene encoding GM-CSF. In some examples, the recombinant HSV-1 has a genome sequence at least 80%, at least 85%, at least 90%, at least 95%, at least 96%, at least 97%, at least 98%, or at least 99% identical to SEQ ID NO: 15. In specific examples, the genome sequence of the recombinant HSV-1 comprises or consists of SEQ ID NO: 23.

[0117] In other particular non-limiting embodiments, the recombinant ICP0-deficient HSV-1 includes a complete deletion of the ICP0 gene, a partial deletion of the ICP47 gene, a mutation of the gC gene (such that it is gC deficient), and includes a heterologous gene encoding GM-CSF. In some examples, the recombinant HSV-1 has a genome sequence at least 80%, at least 85%, at least 90%, at least 95%, at least 96%, at least 97%, at least 98%, or at least 99% identical to SEQ ID NO: 16. In specific examples, the genome sequence of the recombinant HSV-1 comprises or consists of SEQ ID NO: 24.

[0118] Also provided is a method of selectively killing an ALT-dependent tumor cell by administering a recombinant HSV disclosed herein (such as one that is ICP0-deficient, gC deficient, or both ICP0-deficient and gC deficient). In some embodiments, the method is an in vitro method that includes contacting an ALT-dependent tumor cell with a recombinant oncolytic HSV-1. In other embodiments, the method is an in vivo method that includes administering an oncolytic HSV-1 disclosed herein to a subject having an ALT-dependent cancer. In some examples, the in vivo method further includes the step of selecting a subject having an ALT-dependent cancer.

[0119] In some embodiments of the methods disclosed herein, the method further includes administering an anti-cancer therapy to the subject. An appropriate anti-cancer therapy can be selected by a medical practitioner. In some examples, the anti-cancer therapy comprises administration of a telomerase inhibitor, chemotherapy, or radiation therapy. In other examples, the anti-cancer therapy includes surgery, such as surgical resection of the tumor.

[0120] In specific examples, the recombinant HSV-1 (such as one that is ICP0-deficient, gC deficient, or both ICP0-deficient and gC deficient) is used in combination with a telomerase inhibitor. Telomerase inhibitors have the potential to treat cancers that use telomerase to maintain telomeres. Resistance occurs through the down-regulation of telomerase and the switch to ALT to maintain telomere length. Treating tumors with a telomerase inhibitor and an ICP0 deleted HSV-1 inhibits both means by which a cancer cell can maintain telomere length. Telomerase inhibitors include, for example, inhibitors that target the telomerase reverse transcriptase (TERT) catalytic subunit) or inhibitors that target telomerase RNA. TERT inhibitors include, but are not limited to, antisense oligonucleotides, small interfering RNA (siRNA) and double-stranded RNA (dsRNA) that reduce TERT mRNA, and small molecules such as 3′-azido-2′, 3′-dideoxythymine (AZT) and BIBR1532. Examples of telomerase RNA inhibitors include antisense oligonucleotides, hammerhead ribozymes and siRNA (Andrews and Tollefsbol, Methods Mol Biol 405:1-8, 2008).

[0121] In some embodiments, the ALT-dependent cancer is a cancer that is resistant to telomerase inhibitors and/or TERT inhibitors.

[0122] In some embodiments herein, the ALT-dependent cancer is a soft tissue sarcoma, such as but not limited to, a pleomorphic sarcoma, a fibrosarcoma, a leiomyosarcoma, a liposarcoma, an angiosarcoma, an epithelioid sarcoma or a chondrosarcoma. In other embodiments, the ALT-dependent cancer is a cancer of the central nervous system, such as but not limited to an astrocytoma (for example, a diffuse astrocytoma or an anaplastic astrocytoma), GBM, an oligodendroglioma, or a medulloblastoma (including anaplastic and non-anaplastic medulloblastoma). In other embodiments, the ALT-dependent cancer is an osteosarcoma.

[0123] In order to identify an ALT-dependent cancer, and thereby select a subject having an ALT-dependent cancer who would be responsive to HSV oncolytic therapy, a biopsy taken from the subject's tumor can be screened for one or more hallmarks or indicators of ALT. ALT generates extrachromasomal telomeric repeat (ECTR) DNA that associates and co-localizes with PML nuclear bodies to form ALT-associated PML bodies (APBs). Fluorescence in situ hybridization for telomeric rich DNA together with immunofluorescence for PML NBs for the detection of APBs can be used as a marker for ALT. ECTR DNA can be linear double-stranded, circular double-stranded or circular partially double-stranded (C-Circle). Detection of C-circles via a C-circle assay can also be used to determine whether a tumor cell uses ALT to maintain chromosomes. The level of C-circle DNA in cancer cells has been shown to accurately reflect the level of ALT activity, and this biomarker can be found in the blood of patients who have ALT-dependent cancers (Henson et al., Nat Biotechnol 27:1181-1185, 2009). In addition, mutations in ATRx and H3.3 have been reported to associate with ALT and could also be used as an indicator of an ALT-dependent cancer. These assays can be used individually or in combination with the measurement of telomerase levels or telomerase activity to increase the accuracy of identifying ALT cancers. In addition, it is demonstrated herein that the introduction of extrachromosomal DNA, such as a plasmid or sheared calf thymus DNA, into a telomerase-positive cell induces the expression of IFIT1, IFIT2, IFIT3, OAS1 and OAS2, while an ALT cell fails to elicit a similar response. This differential response can also be used in order to identify ALT-dependent cancers.

[0124] Further provided herein are recombinant ICP0-deficient HSV-1 that include a heterologous gene. In some embodiments, the heterologous gene is an immunostimulatory molecule. In particular examples, the immunostimulatory molecule is GM-CSF, CCL5, CCL1, IL-12 or B7.1

[0125] In particular examples, the recombinant HSV-1 includes a complete deletion of the ICP0 gene and a heterologous gene encoding GM-CSF. In specific examples, the recombinant HSV-1 has a genome sequence at least 80%, at least 85%, at least 90%, at least 95%, at least 96%, at least 97%, at least 98%, or at least 99% identical to SEQ ID NO: 15. In one non-limiting example, the genome sequence of the recombinant HSV-1 comprises or consists of SEQ ID NO: 15.

[0126] Also provided herein are recombinant ICP0-deficient HSV-1 that include disruptions in one or more additional HSV-1 genes. In some embodiments, the one or more genes are selected from ICP34.5, ICP6 and ICP47. In some examples, the disruption is a complete deletion, a partial deletion, a point mutation or an insertion. In some instances, the recombinant HSV-1 further includes a heterologous gene, such as, but not limited to, a gene encoding an immunostimulatory molecule.

[0127] In particular examples, the recombinant HSV-1 includes a complete deletion of the ICP0 gene, a partial deletion of the ICP47 gene and a heterologous gene encoding GM-CSF. In specific examples, the recombinant HSV-1 has a genome sequence at least 80%, at least 85%, at least 90%, at least 95%, at least 96%, at least 97%, at least 98%, or at least 99% identical to SEQ ID NO: 16. In one non-limiting example, the genome sequence of the recombinant HSV-1 comprises or consists of SEQ ID NO: 16.

[0128] Use of the recombinant HSV-1 disclosed herein methods of treating an ALT-dependent cancer in a subject is also provided herein. The method includes administering a recombinant HSV-1 disclosed herein to the subject. In some embodiments, the method further includes selecting a subject having an ALT-dependent cancer.

### V. Pharmaceutical Compositions of Oncolytic HSV

[0129] Provided herein are compositions comprising a recombinant HSV, such as one that is ICP0-deficient, gC deficient, or both ICP0-deficient and gC deficient. The compositions are, optionally, suitable for formulation and administration in vitro or in vivo. Optionally, the compositions comprise one or more of the provided agents and a pharmaceutically acceptable carrier. Suitable carriers and their formulations are described in Remington: The Science and Practice of Pharmacy, 22^{nd} Edition, Loyd V. Allen et al., editors, Pharmaceutical Press (2012). Pharmaceutically acceptable carriers include materials that are not biologically or otherwise undesirable, i.e., the material is administered to a subject without causing undesirable biological effects or interacting in a deleterious manner with the other components of the pharmaceutical composition in which it is contained. If administered to a subject, the carrier is optionally selected to minimize degradation of the active ingredient and to minimize adverse side effects in the subject.

[0130] The recombinant viruses are administered in accord with known methods, such as intravenous administration, e.g., as a bolus or by continuous infusion over a period of time, by intramuscular, intraperitoneal, intracerobrospinal, subcutaneous, intra-articular, intrasynovial, intrathecal, oral, topical, intratumoral or inhalation routes. The administration may be local (such as intratumoral) or systemic. The compositions can be administered via any of several routes of administration, including topically, orally, parenterally, intravenously, intra-articularly, intraperitoneally, intramuscularly, subcutaneously, intracavity, transdermally, intrahepatically, intracranially, nebulization/inhalation, or by installation via bronchoscopy. Thus, the compositions are administered in a number of ways depending on whether local or systemic treatment is desired, and on the area to be treated.

[0131] In some embodiments, the compositions for administration will include a recombinant virus as described herein dissolved in a pharmaceutically acceptable carrier, preferably an aqueous carrier. A variety of aqueous carriers can be used, e.g., buffered saline and the like. These solutions are sterile and generally free of undesirable matter. These compositions may be sterilized by conventional, well known sterilization techniques. The compositions may contain pharmaceutically acceptable auxiliary substances as required to approximate physiological conditions such as pH adjusting and buffering agents, toxicity adjusting agents and the like, for example, sodium acetate, sodium chloride, potassium chloride, calcium chloride, sodium lactate and the like. The concentration of active agent in these formulations can vary widely, and will be selected primarily based on fluid volumes, viscosities, body weight and the like in accordance with the particular mode of administration selected and the subject's needs.

[0132] Pharmaceutical formulations, particularly, of the recombinant viruses can be prepared by mixing the recombinant virus having the desired degree of purity with optional pharmaceutically acceptable carriers, excipients or stabilizers. Such formulations can be lyophilized formulations or aqueous solutions.

[0133] Acceptable carriers, excipients, or stabilizers are nontoxic to recipients at the dosages and concentrations used. Acceptable carriers, excipients or stabilizers can be acetate, phosphate, citrate, and other organic acids; antioxidants (e.g., ascorbic acid) preservatives, low molecular weight polypeptides; proteins, such as serum albumin or gelatin, or hydrophilic polymers such as polyvinylpyllolidone; and amino acids, monosaccharides, disaccharides, and other carbohydrates including glucose, mannose, or dextrins; chelating agents; and ionic and non-ionic surfactants (e.g., polysorbate); salt-forming counter-ions such as sodium; metal complexes (e.g. Zn-protein complexes); and/or non-ionic surfactants. The recombinant HSV can be formulated at any appropriate concentration of infectious units.

[0134] Formulations suitable for oral administration can consist of (a) liquid solutions, such as an effective amount of the recombinant virus suspended in diluents, such as water, saline or PEG 400; (b) capsules, sachets or tablets, each containing a predetermined amount of the active ingredient, as liquids, solids, granules or gelatin; (c) suspensions in an appropriate liquid; and (d) suitable emulsions. Tablet forms can include one or more of lactose, sucrose, mannitol, sorbitol, calcium phosphates, corn starch, potato starch, microcrystalline cellulose, gelatin, colloidal silicon dioxide, talc, magnesium stearate, stearic acid, and other excipients, colorants, fillers, binders, diluents, buffering agents, moistening agents, preservatives, flavoring agents, dyes, disintegrating agents, and pharmaceutically compatible carriers. Lozenge forms can comprise the active ingredient in a flavor, e.g., sucrose, as well as pastilles comprising the active ingredient in an inert base, such as gelatin and glycerin or sucrose and acacia emulsions, gels, and the like containing, in addition to the active ingredient, carriers known in the art.

[0135] The recombinant HSV, alone or in combination with other suitable components, can be made into aerosol formulations (i.e., they can be “nebulized”) to be administered via inhalation. Aerosol formulations can be placed into pressurized acceptable propellants, such as dichlorodifluoromethane, propane, nitrogen, and the like.

[0136] Formulations suitable for parenteral administration, such as, for example, by intraarticular (in the joints), intravenous, intramuscular, intratumoral, intradermal, intraperitoneal, and subcutaneous routes, include aqueous and non-aqueous, isotonic sterile injection solutions, which can contain antioxidants, buffers, bacteriostats, and solutes that render the formulation isotonic with the blood of the intended recipient, and aqueous and non-aqueous sterile suspensions that can include suspending agents, solubilizers, thickening agents, stabilizers, and preservatives. In the provided methods, compositions can be administered, for example, by intravenous infusion, orally, topically, intraperitoneally, intravesically intratumorally, or intrathecally. In some embodiments, parenteral administration, intratumoral administration, or intravenous administration are the methods of administration. The formulations of compounds can be presented in unit-dose or multi-dose sealed containers, such as ampules and vials.

[0137] Injection solutions and suspensions can be prepared from sterile powders, granules, and tablets of the kind previously described. Cells transduced or infected by recombinant HSV or transfected with nucleic acids for ex vivo therapy can also be administered intravenously or parenterally as described above.

[0138] In some embodiments, the pharmaceutical preparation is in unit dosage form. In such form the preparation is subdivided into unit doses containing appropriate quantities of the active component. Thus, the pharmaceutical compositions can be administered in a variety of unit dosage forms depending upon the method of administration. For example, unit dosage forms suitable for oral administration include, but are not limited to, powder, tablets, pills, capsules and lozenges.

### V. Methods of Treatment Using Oncolytic HSV

[0139] The recombinant HSV compositions disclosed herein (such as those that include an HSV that is ICP0-deficient, gC deficient, or both ICP0-deficient and gC deficient) can be administered for therapeutic or prophylactic treatment. In particular, provided are methods of inhibiting ALT-dependent tumor cell viability in a subject, inhibiting ALT-dependent tumor progression in a subject, reducing ALT-dependent tumor volume in a subject and/or treating ALT-dependent cancer in a subject. The methods include administering a therapeutically effective amount of a recombinant HSV (or composition thereof) to the subject. In some embodiments, the method further includes selecting a subject having an ALT-dependent cancer. As described throughout, the oncolytic HSV or pharmaceutical composition is administered in any number of ways including, but not limited to, intravenously, intravascularly, intrathecally, intramuscularly, subcutaneously, intratumorally, intraperitoneally, or orally. Optionally, the method further comprises administering to the subject one or more additional therapeutic agents. In some embodiments, the therapeutic agent is a chemotherapeutic agent (such as cisplatin, 5-FU, carboplatin, and the like). In some embodiments, the therapeutic agent is a biologic agent (such as trastuzumab, cetuximab, ribuximab, panitumumab, and the like, see for example Scott et al., Nature Reviews Cancer 12:278-287, 2012, herein incorporated by reference). In other embodiments, the therapeutic agent is a telomerase inhibitor. In other embodiments, the therapeutic agent is an immune modulator.

[0140] In some embodiments, the ALT-dependent cancer or tumor is a soft tissue sarcoma, an osteosarcoma, or a cancer of the central nervous system, such as an astrocytoma. In some cases, the cancer is metastatic. In some examples, the tumor is a tumor of the mammary, pituitary, thyroid, or prostate gland; a tumor of the brain, liver, meninges, bone, ovary, uterus, or cervix; monocytic or myelogenous leukemia; adenocarcinoma, adenoma, astrocytoma, bladder tumor, brain tumor, Burkitt's lymphoma, breast carcinoma, cervical carcinoma, colon carcinoma, kidney carcinoma, liver carcinoma, lung carcinoma, ovarian carcinoma, pancreatic carcinoma, prostate carcinoma, rectal carcinoma, skin carcinoma, stomach carcinoma, testis carcinoma, thyroid carcinoma, chondrosarcoma, choriocarcinoma, fibroma, fibrosarcoma, glioblastoma, glioma, hepatoma, histiocytoma, leiomyoblastoma, leiomyosarcoma, lymphoma, liposarcoma cell, mammary tumor, medulloblastoma, myeloma, plasmacytoma, neuroblastoma, neuroglioma, osteogenic sarcoma, pancreatic tumor, pituitary tumor, retinoblastoma, rhabdomyosarcoma, sarcoma, testicular tumor, thymoma, or Wilms tumor. Tumors include both primary and metastatic solid tumors, including carcinomas of breast, colon, rectum, lung, oropharynx, hypopharynx, esophagus, stomach, pancreas, liver, gallbladder and bile ducts, small intestine, urinary tract (including kidney, bladder and urothelium), female genital tract, (including cervix, uterus, and ovaries as well as choriocarcinoma and gestational trophoblastic disease), male genital tract (including prostate, seminal vesicles, testes and germ cell tumors), endocrine glands (including the thyroid, adrenal, and pituitary glands), and skin, as well as hemangiomas, melanomas, sarcomas (including those arising from bone and soft tissues as well as Kaposi's sarcoma) and tumors of the brain, nerves, eyes, and meninges (including astrocytomas, gliomas, glioblastomas, retinoblastomas, neuromas, neuroblastomas, Schwannomas, and meningiomas). In some aspects, solid tumors may be treated that arise from hematopoietic malignancies such as leukemias (i.e. chloromas, plasmacytomas and the plaques and tumors of mycosis fungoides and cutaneous T-cell lymphoma/leukemia) as well as in the treatment of lymphomas (both Hodgkin's and non-Hodgkin's lymphomas). In addition, treatments may be useful in the prevention of metastases from the tumors described herein.

[0141] In therapeutic applications, recombinant HSV or compositions thereof are administered to a subject in a therapeutically effective amount or dose. Amounts effective for this use will depend upon the severity of the disease and the general state of the patient's health. Single or multiple administrations of the compositions may be administered depending on the dosage and frequency as required and tolerated by the patient. A “patient” or “subject” includes both humans and other animals, particularly mammals (such as cats, dogs, cows, sheep, and pigs). Thus, the methods are applicable to both human therapy and veterinary applications.

[0142] An effective amount of a recombinant HSV is determined on an individual basis and is based, at least in part, on the particular recombinant virus used; the individual's size, age, gender; and the size and other characteristics of the proliferating cells. For example, for treatment of a human, at least 10³ plaque forming units (PFU) of a recombinant virus is used, such as at least 10⁴, at least 10⁵, at least 10⁶, at least 10⁷, at least 10⁸, at least 10⁹, at least 10¹⁰, at least 10¹¹, or at least 10¹² PFU, for example approximately 10³ to 10¹² PFU of a recombinant virus is used, depending on the type, size and number of proliferating cells or neoplasms present. The effective amount can be from about 1.0 pfu/kg body weight to about 10¹⁵ pfu/kg body weight (e.g., from about 10² pfu/kg body weight to about 10¹³ pfu/kg body weight). A recombinant HSV is administered in a single dose or in multiple doses (e.g., two, three, four, six, or more doses). Multiple doses can be administered concurrently or consecutively (e.g., over a period of days or weeks).

[0143] Administration of the HSV-1 oncolytic viruses disclosed herein can also be accompanied by administration of other anti-cancer agents or therapeutic treatments (such as surgical resection of a tumor and/or treatment with a telomerase inhibitor). Any suitable anti-cancer agent can be administered in combination with the recombinant viruses disclosed herein. Exemplary anti-cancer agents include, but are not limited to, chemotherapeutic agents, such as, for example, mitotic inhibitors, alkylating agents, anti-metabolites, intercalating antibiotics, growth factor inhibitors, cell cycle inhibitors, enzymes, topoisomerase inhibitors, anti-survival agents, biological response modifiers, anti-hormones (e.g. anti-androgens), CDK inhibitors and anti-angiogenesis agents. Other anti-cancer treatments include radiation therapy and other antibodies that specifically target cancer cells (e.g., biologics).

[0144] Non-limiting examples of alkylating agents include nitrogen mustards (such as mechlorethamine, cyclophosphamide, melphalan, uracil mustard or chlorambucil), alkyl sulfonates (such as busulfan), nitrosoureas (such as carmustine, lomustine, semustine, streptozocin, or dacarbazine).

[0145] Non-limiting examples of antimetabolites include folic acid analogs (such as methotrexate), pyrimidine analogs (such as 5-FU or cytarabine), and purine analogs, such as mercaptopurine or thioguanine.

[0146] Non-limiting examples of natural products include vinca alkaloids (such as vinblastine, vincristine, or vindesine), epipodophyllotoxins (such as etoposide or teniposide), antibiotics (such as dactinomycin, daunorubicin, doxorubicin, bleomycin, plicamycin, or mitomycin C), and enzymes (such as L-asparaginase).

[0147] Non-limiting examples of miscellaneous agents include platinum coordination complexes (such as cis-diamine-dichloroplatinum II also known as cisplatin), substituted ureas (such as hydroxyurea), methyl hydrazine derivatives (such as procarbazine), and adrenocrotical suppressants (such as mitotane and aminoglutethimide).

[0148] Non-limiting examples of hormones and antagonists include adrenocorticosteroids (such as prednisone), progestins (such as hydroxyprogesterone caproate, medroxyprogesterone acetate, and magestrol acetate), estrogens (such as diethylstilbestrol and ethinyl estradiol), antiestrogens (such as tamoxifen), and androgens (such as testerone proprionate and fluoxymesterone). Examples of the most commonly used chemotherapy drugs include Adriamycin, Alkeran, Ara-C, BiCNU, Busulfan, CCNU, Carboplatinum, Cisplatinum, Cytoxan, Daunorubicin, DTIC, 5-FU, Fludarabine, Hydrea, Idarubicin, Ifosfamide, Methotrexate, Mithramycin, Mitomycin, Mitoxantrone, Nitrogen Mustard, Taxol (or other taxanes, such as docetaxel), Velban, Vincristine, VP-16, while some more newer drugs include Gemcitabine (Gemzar), Herceptin, Irinotecan (Camptosar, CPT-11), Leustatin, Navelbine, Rituxan STI-571, Taxotere, Topotecan (Hycamtin), Xeloda (Capecitabine), Zevelin and calcitriol.

[0149] Non-limiting examples of immunomodulators that can be used include AS-101 (Wyeth-Ayerst Labs.), bropirimine (Upjohn), gamma interferon (Genentech), GM-CSF (granulocyte macrophage colony stimulating factor; Genetics Institute), IL-2 (Cetus or Hoffman-LaRoche), human immune globulin (Cutter Biological), IMREG (from Imreg of New Orleans, La.), SK&F 106528, and TNF (tumor necrosis factor; Genentech).

[0150] Another common treatment for some types of cancer is surgical treatment, for example surgical resection of the cancer or a portion of it. Another example of a treatment is radiotherapy, for example administration of radioactive material or energy (such as external beam therapy) to the tumor site to help eradicate the tumor or shrink it prior to surgical resection.

[0151] CDK (Cyclin-dependent kinase) inhibitors are agents that inhibit the function of CDKs. Non-limiting examples of CDK inhibitors for use in the provided methods include AG-024322, AT7519, AZD5438, flavopiridol, indisulam, P1446A-05, PD-0332991, and P276-00 (see e.g., Lapenna et al., Nature Reviews, 8:547-566, 2009). Other CDK inhibitors include LY2835219, Palbociclib, LEE011 (Novartis), pan-CDK inhibitor AT7519, seliciclib, CYC065, butyrolactone hymenialdisine, SU9516, CINK4, PD0183812 or fascaplysin.

[0152] In some examples, the CDK inhibitor is a broad-range inhibitor (such as flavopiridol, olomoucine, roscovitine, kenpaullone, SNS-032, AT7519, AG-024322, (S)-Roscovitine or R547). In other examples, the CDK inhibitor is a specific inhibitor (such as fascaplysin, ryuvidine, purvalanol A, NU2058, BML-259, SU 9516, PD0332991 or P-276-00).

[0153] The choice of agent and dosage can be determined readily by one of skill in the art based on the given disease being treated. Combinations of agents or compositions can be administered either concomitantly (e.g., as a mixture), separately but simultaneously (e.g., via separate intravenous lines) or sequentially (e.g., one agent is administered first followed by administration of the second agent). Thus, the term combination is used to refer to concomitant, simultaneous or sequential administration of two or more agents or compositions.

[0154] According to the methods disclosed herein, the subject is administered an effective amount of one or more of the agents provided herein. The effective amount is defined as any amount necessary to produce a desired physiologic response (e.g., killing of an ALT-dependent cancer cell). Therapeutic agents are typically administered at the initial dosage of about 0.001 mg/kg to about 1000 mg/kg daily. A dose range of about 0.01 mg/kg to about 500 mg/kg, or about 0.1 mg/kg to about 200 mg/kg, or about 1 mg/kg to about 100 mg/kg, or about 10 mg/kg to about 50 mg/kg, can be used. The dosages, however, may be varied depending upon the requirements of the subject, the severity of the condition being treated, and the compound being employed. For example, dosages can be empirically determined considering the type and stage of cancer diagnosed in a particular subject. The dose administered to a subject, in the context of the provided methods should be sufficient to affect a beneficial therapeutic response in the patient over time. Determination of the proper dosage for a particular situation is within the skill of the practitioner. Thus, effective amounts and schedules for administering the agent may be determined empirically by one skilled in the art. The dosage should not be so large as to cause substantial adverse side effects, such as unwanted cross-reactions, anaphylactic reactions, and the like. The dosage can be adjusted by the individual physician in the event of any contraindications. Guidance can be found in the literature for appropriate dosages for given classes of pharmaceutical products.

[0155] The following examples are provided to illustrate certain particular features and/or embodiments. These examples should not be construed to limit the disclosure to the particular features or embodiments described.

### EXAMPLES

### Example 1: Materials and Methods

[0156] This examples describes the materials and experimental procedures used for the studies described in Example 2.

### Cell Lines

[0157] HOS, SJSA1, U2OS, SAOS2, KMST6, SUSM-1, SKBR3, SK-LU-1, HeLa LT (O'Sullivan et al., Nat Struct Mol Biol 21, 167-174, 2014), HFF, DAOY, A549, H1299, L229N, A172, U87MG, T98G, DBTRG, WI-38 VA13/R2 GM847, SJRH30, and G292 were grown in DMEM with 10% FBS at 37° C. and 5% CO₂. BJ cells were grown in MEM, NEAA, sodium pyruvate and 10% FBS at 37° C. and 5% CO₂. SAEC were from Lonza and grown in SABM supplemented with SAGM SINGLEQUOTS™ and grown at 37° C. in 5% CO₂ and 3% O₂. LS2, HIO107, HIO107 hTERT, HIO118 and HIO 118 hTERT cells were provided by Domonique Broccoli (Plantinga et al., Mol Cancer Res 11, 557-567, 2013; Mitchell, Mol Cancer Ther 9, 682-692, 2010). LS2 cells were grown in RPMI supplemented with 1×GLUTAMAX™ (Life Technologies), 1×MEM essential vitamin mix (Lonza cat #13-607c), 1×ITES (Lonza cat #17-839z), 1×Pen/Strep/L-glut (Life Technologies cat #10378-016), 1 mM sodium pyruvate (MP Biomedical cat #1682049), lx non-essential amino acids (Lonza cat #13-114E) and 20% FBS at 37° C. and 5% CO₂. HIO cells were grown in a 1:1 dilution of Medium 199 (Sigma-Aldrich cat # M4530) and MCDB 105 (Sigma cat # M6395) supplemented with 4% FBS, 1×Glutagro (Cellgro cat #25-015-C1) and 0.2 U insulin (Santa Cruz Biotechnology cat # sc-360248) at 37° C. and 5% CO₂. SW872 were purchased from ATCC and initially cultured in L15 medium supplemented with 10% FBS at 37° C. without CO₂. These cells were then conditioned to grow in LS2 medium and all subsequent experiments with these cells were done in LS2 medium.

### Viruses, Infections and Plaque Assay

[0158] The HSV-1 strains used in the studies disclosed herein were the 17syn+ wild type (WT) and the matched ICP0 deletion mutant (ΔICP0) d11403 (Stow and Stow, J Gen Virol 67 (Pt 12), 2571-2585, 1986). Viruses were grown in Vero cells as follows. A 90% confluent 15 cm plate was infected at an MOI of 0.001 for HSV-1 WT and 0.1 for HSV-1 ΔICP0 and incubated until cells were rounded but still attached to the plate, typically 3-5 days. Both the media and cells were collected and slowly frozen at −80° C. followed by a quick thaw at 37° C. for a total of 3 freeze/thaw cycles. The mixture was spun at 3000 RPM for 15 minutes and the resulting supernatant was collected and spun for an additional 15 minutes at 3000 RPM to remove any residual cell debris. The supernatant from this spin was collected, aliquoted and stored at −80° C.

[0159] For tittering, one aliquot was thawed and tittered on U2OS cells by plaque assay since these cells fully rescue replication of ICP0 deleted HSV-1. U2OS cells (100,000) were plated in 24-well plates and allowed to attach for 6 hours. The virus was serial diluted in DMEM without serum yielding a dilution range from 10⁻³ to 10⁻⁸. The diluted virus was added to the cells (3 wells/dilution) and incubated for 1 hour at 37° C. The virus was removed and replaced with DMEM containing 10% FBS and 1% human serum and incubated for 36-48 hours until clear plaques were visible. To better visualize the plaques, the media was removed and 1 mg/mL crystal violet dissolved in 20% ethanol was added to each well and incubated for 10 minutes. Each well was washed once with PBS and plaques were counted in the well with the least number of observable plaques. The average number of plaques from 3 wells of the same dilution was calculated. The titer equals the average number of plaques counted×10^{(dilution number)} pfu/mL. For all other plaque assays, the cells were infected at the indicated multiplicity of infection (MOI), which was calculated based on viral titer and number of cells per well.

[0160] To examine the co-localization of incoming HSV-1 viral genomes with PML NBs, cells were infected with HSV-1 WT or ΔICP0 as described above and incubated for 24 hours. Cells were washed, fixed and stained with antibodies against ICP4 and PML. The edges of plaques were imaged by confocal microscopy at 63× magnification for cells in the early stages of infection.

### RT-qPCR Analysis

[0161] The Ambion PURELINK™ RNA Mini Kit (cat #12183018A) was used for the isolation of RNA according to the manufacturer's recommendations. Total RNA was DNase treated using the Ambion DNA-free kit (cat # AM1906) and 1 μg of total RNA was reverse transcribed using the Bio-Rad iScript Reverse Transcription Supermix for RT-qPCR (cat #170-8840). The cDNA was diluted to a final volume of 100 μL and 2 μL was used to set up 10 μL RT-qPCR reactions with Kapa SYBR™ Fast qPCR Universal Master Mix (Kapa Biosystems cat # KK4601). All samples were run in duplicate on a Bio-Rad CFX96 real-time system. The reactions were heated to 95° C. for 30 seconds followed by 40 cycles of 95° C. for 5 seconds and 61° C. for 30 seconds. Following the 40 cycles, a melt curve analysis was performed to ensure amplification of a single product. The target genes were detected using the following primers:

(SEQ ID NO: 1)

IFIT1 (Fwd) TGTCCAAGGTGGTAAAGGGTG

(SEQ ID NO: 2)

IFIT1 (Rev) CAGGTCACCAGACTCCTCAC

(SEQ ID NO: 3)

IFIT2 (Fwd) AAGCACCTCAAAGGGCAAAAC

(SEQ ID NO: 4)

IFIT2 (Rev) TCGGCCCATGTGATAGTAGAC

(SEQ ID NO: 5)

IFIT3 (Fwd) TCAGAAGTCTAGTCACTTGGGG

(SEQ ID NO: 6)

IFIT3 (Rev) ACACCTTCGCCCTTTCATTTC

(SEQ ID NO: 7)

OAS1 (Fwd) TGTCCAAGGTGGTAAAGGGTG

(SEQ ID NO: 8)

OAS1 (Rev) CCGGCGATTTAACTGATCCTG

(SEQ ID NO: 9)

OAS2 (Fwd) AGGTGGCTCCTATGGACGG

(SEQ ID NO: 10)

OAS2 (Rev) TTTATCGAGGATGTCACGTTGG

(SEQ ID NO: 11)

MX1 (Fwd) CAGCACCTGATGGCCTATCA

(SEQ ID NO: 12)

MX1 (Rev) ACGTCTGGAGCATGAAGAACTG

(SEQ ID NO: 13)

GAPDH (Fwd) TTCGACAGTCAGCCGCATCTTCTT

(SEQ ID NO: 14)

GAPDH (Rev) CAGGCGCCCAATACGACCAAATC

[0162] The ΔΔCq method was used to calculate changes in mRNA expression levels relative to the indicated controls.

### C-Circle Assay

[0163] The protocol for C-circle amplification was slightly modified from that published by Henson et al. (Nat Biotechnol 27(12):1181-1185, 2009). Briefly, genomic DNA was purified, digested with AluI and MboI and cleaned up by phenol-chloroform extraction and precipitation. DNA concentration was measured using a NANODROP™ and diluted in ultraclean water. Final template amount of 100, 50 or 25 ng was diluted to 10 μl with water and combined with 10 μl of 0.2 mg/ml BSA, 0.1% Tween detergent, 1 mM each dATP, dGTP, dTTP and 1×Φ29 Buffer (NEB) in the presence or absence of 7.5 U ΦDNA polymerase (NEB). Samples were incubated at 30° C. for 8 hours and then at 65° C. for 20 minutes. The reaction products were diluted to 100 μl with 2×SSC and dot-blotted onto a 2×SSC-soaked nylon membrane. DNA was UV cross-linked onto the membrane and hybridized with a ³²P end-labelled (CCCTAA)₄ oligo probe (SEQ ID NO: 15). Blots were washed in 2×SSC and 1×SSC/0.1% SDS and exposed to PhosphorImager screens, scanned and quantified using a Typhoon 9400 Phosphorlmager (Amersham/GE Healthcare).

### Immunofluorescence and IF-Telomere FISH

[0164] For all immunofluorescence experiments, cells were grown on glass cover slips in 24-well plates. At the time of harvest the cells were washed twice with PBS and fixed with 2% paraformaldehyde in PBS for 10 minutes at room temperature. Following fixation, the cells were washed twice with MilliQ water and permeabilized with KCM buffer (120 mM KCL, 20 mM NaCl, 10 mM Tris pH 7.5 and 0.1% TritonX-100) for 10 minutes at room temperature. Cells were washed twice with PBS and stored at 4° C.

[0165] Fixed and permeabilized cells were incubated for 30 minutes in blocking buffer (PBS with 5% normal goat serum, Jackson ImmunoResearch cat #005-000-121), 0.3% fish skin gelatin (Sigma cat # G7765). Blocking buffer was removed and primary antibodies diluted in blocking buffer were added and incubated for 1 hour at room temperature. Primary antibodies were removed and the cells were rinsed quickly with PBS followed by 4, 5-minute washes in PBS. After the final wash, the cover slips were incubated with secondary antibody diluted in blocking buffer for 30 minutes. The cover slips were washed as before and counter-stained with Hoescht DNA dye. Cells were rinsed with MilliQ water to remove excess salt and mounted with ProLong Gold antifade (Life Technologies cat # P36930). Mounted cover slips were left in the dark overnight at room temperature to allow for the mounting medium to cure, following which they were imaged on a Zeiss LSM 780 confocal microscope at 63× magnification.

[0166] For immunofluorescence combined with telomere FISH, cover slips were treated as described above with the following modifications. The initial 30 minute incubation in blocking buffer was carried out at 37° C. in the presence of 100 μg/mL RNaseA. Following the incubation with secondary antibody and washing in PBS, the coverslips were fixed in 2% paraformaldehyde for 10 minutes at room temperature then washed three times with MilliQ water. The cells were ethanol dehydrated by sequential incubation in 70% ethanol for 3 minutes, 90% ethanol for 2 minutes and 100% ethanol for 2 minutes and allowed to air dry for 15 minutes. Five μL of a 0.3 μg/mL stock of the Alexa488-PNA-TelC (PNA Bio cat #F1004) was spotted onto a clean glass slide and coverslips were placed cells side down onto PNA probe solution. The slide was heated was heated to 74° C. for 5 minutes then placed in a humidified chamber and allowed to hybridize overnight. Coverslips were washed 3 times for 5 minutes in PNA wash buffer A (70% formamide and 10 mM Tris pH 7.5), 3 times for 5 minutes in PNA wash buffer B (50 mM Tris pH7.5, 150 mM NaCl and 0.8% Tween-20) and then rinsed twice with MilliQ water. Hoescht was added to the second wash with PNA wash buffer B. Coverslips were air-dried and mounted using ProLong Gold.

### Antibodies

[0167] PML (cat # ABD-030) was from Jena Bioscience and used at a 1:1000 dilution. ICP4 was tissue culture supernatant generated from the 58-S hybridoma clone from American Type Culture Collection (cat # HB-8183) and used at a 1:100 dilution. ASF1A (cat #2990) and ASF1B (cat #2769) were both from Cell Signaling Technology and used at 1:1000 dilution. HP1 antibody was from Upstate and used at a 1:100 dilution. Goat anti-mouse Alexa Fluor 488 (cat # A11029), goat anti-rabbit Alexa Fluor 555 (cat # A21429) and goat anti-mouse Alexa Fluor 647 (cat # A21236) were all from Life Technologies and used at a 1:1000 dilution.

### Example 2: ALT-Dependent Replication of ICP0 Null HSV-1

[0168] This example describes the finding that ICP0-deficient HSV-1 selectively replicates in and kills ALT-dependent tumor cells.

### Localization of HSV-1 Viral Genomes Resembles ALT Generated ECTRs

[0169] There is a striking overlap between the molecular targets of tumor mutations and DNA virus proteins (O'Shea, Oncogene 24, 7640-7655, 2005). Herpes simplex virus 1 (HSV-1) is an enveloped ˜152 kbp double-strand linear DNA virus that undergoes lytic replication in a wide range of cell types (Knipe, D. M. & Howley, P. M. Fields virology. 6th edn, (Wolters Kluwer/Lippincott Williams & Wilkins Health, 2013). Early post-entry, the circularized viral genomes accumulate within PML nuclear bodies (PML NBs) along the periphery of the nuclear envelope. This accumulation is demonstrated by immunofluorescence for PML protein and the HSV-1 encoded ICP4 protein, which binds and marks viral genomes (FIGS. 1A and 1B). If left unchecked, this association results in the sequestration of viral genomes by PML NBs resulting in inhibition of viral replication and triggering of the expression of cellular genes that induce a protective antiviral and host immune response (FIG. 1A) (Everett et al., J Virol 80, 7995-8005, 2006; Boutell, J Gen Virol 94, 465-481, 2013). To prevent this, HSV-1 encodes a viral protein, ICP0, which degrades PML NBs as well as blocks the activation of downstream antiviral genes (FIG. 1B) (Boutell and Everett, J Gen Virol 94, 465-481, 2013).

[0170] Mutant viruses that lack ICP0 (HSV-1 ΔICP0) are highly defective and exhibit ˜1000-fold defect in replication efficiency in normal cells at low multiplicities of infection (MOI) as measured by plaque assay (FIG. 1E). This defect in replication can be overcome at high MOI, suggesting the restriction is saturable (FIG. 1E). Furthermore, it has been observed that an ICP0 deleted virus replicates to wild-type levels in the U2OS osteosarcoma derived cell line at low MOI (FIG. 1F) (Yao and Schaffer, J Virol 69, 6249-6258, 1995). This indicates that potential restriction factor(s) may have been lost in these cells during transformation. The loss of critical HSV-1 specific restriction factors is further supported by somatic cell hybridization experiments in which lytic replication of HSV-1 ΔICP0 is inhibited after U2OS are fused with the non-permissive HEL fibroblasts (Hancock and Corcoran, Virology 352, 237-252, 2006). However, it is unknown what those factor(s) are and why U2OS cells rescue replication of HSV-1 ΔICP0 back to wild type levels.

[0171] It was hypothesized that the rescue of HSV-1 ΔICP0 replication by U2OS cells is due to the use of ALT as the primary telomere maintenance mechanism in these cells. Although the molecular understanding of ALT is currently limited, there are two defining characteristics of ALT that bare striking resemblance to HSV-1 infection. First, telomere maintenance via ALT generates a large amount of extrachromosomal telomeric repeat (ECTR) DNA. This DNA is highly repetitive and present in the nucleus as double-stranded linear, double-stranded circular as well as partially double-stranded circular forms (FIG. 1C) (Nabetani and Ishikawa, Mol Cell Biol 29, 703-713, 2009; Henson et al., Nat Biotech 27, 1181-1185, 2009). Second, together with telomeres, ECTRs accumulate in and co-localize with PML NBs to form ALT-associated PML NBs (APBs) (Yeager et al., Cancer Res 59, 4175-4179, 1999). APBs are typically present in 5% of asynchronously dividing ALT (Yeager et al., Cancer Res 59, 4175-4179, 1999) cells and can be visualized via immunofluorescence of cells using ALT, such as U2OS, stained for PML and a PNA-TelC FISH probe (FIG. 1D). Traditionally they have been characterized by their large size (>1 μM) and the presence of telomere interacting proteins and DNA damage response proteins in addition to telomeres and ECTRs (Chung et al., Nucleus 3, 263-275, 2012). However, a few groups have reported the presence of smaller APBs in 50-90% of asynchronously dividing ALT cells (Nabetani et al., J Biol Chem 279, 25849-25857, 2004; Osterwald, Biotechnol J7, 103-116, 2012).

[0172] The current model of ALT suggests that PML NBs facilitate telomere maintenance as well as sequesters ECTRs. It has been proposed that the sequestration of ECTRs by PML NBs prevents the ends of the linear double strand DNA ECTRs from being recognized as double strand breaks activating a deleterious DNA damage response (FIG. 1C) (Chung et al., Nucleus 3, 263-275, 2012). However, this model assumes accumulation of ECTRs in PML NBs is inert and fails to address the potential long-term impact that such an accumulation of DNA would have on the normal functions of PML NBs. Notwithstanding, the association of ECTRs with PML NBs presents an intriguing convergence with viral infection and detection of their genomes.

[0173] Under normal conditions, organization of these bodies is dependent on PML. In addition to PML a myriad of other proteins have been reported to localize to these nuclear domains, such as ATRX, DAXX and SP100. Typically, 1-30 PML NBs, depending on cell type and phase of the cell cycle, are observed at the inter-chromatin space (Bernardi and Pandolfi, Nat Rev Mol Cell Biol 8, 1006-1016). There, PML NBs act as hubs regulating chromatin organization, transcription (activation and repression), sequestration of foreign DNA, DNA repair, cytokine and interferon signaling, and senescence among many other diverse cellular processes (Bernardi and Pandolfi, Nat Rev Mol Cell Biol 8, 1006-1016; 2007; Sahin et al., J Pathol 234, 289-291, 2014; Maarifi et al., Cytokine Growth Factor Rev 25, 551-561, 2014; Batty et al., Front Biosci 14, 1182-1196, 2009). Since PML NBs are at the nexus of telomere maintenance via ALT and HSV-1 infection and present in limited number, it was hypothesized that the association of telomeres and ECTRs with PML NBs could saturate their capacity to sequester extrachromosomal DNA. This would in essence render PML NBs blind to incoming HSV-1 viral genomes at low MOI. If true, one would expect that in ALT cells, such as U2OS, incoming viral genomes would be free from the constraints and sequestration imposed on them by PML NBs. From this two testable predictions arise: disruption of PML NBs in a non-ALT cell should rescue replication of HSV-1 ΔICP0, and incoming viral genomes would fail to localize with PML NBs in an ALT cell.

[0174] Using RNAi, PML NBs were disrupted by knocking down PML, ATRX or DAXX in BJ fibroblasts (non-ALT) (FIG. 5A). Lytic replication of HSV-1 WT or ΔICP0 was then measured by plaque assay in the presence of the knockdown and compared to lytic replication efficiency in BJ cells that received control siRNA. In agreement with previous reports (Everett et al., J Virol 80, 7995-8005, 2006; Lukashchuk, J Virol 84, 4026-4040, 2010; Boutell, J Gen Virol 94, 465-481, 2013), disruption of the PML NB via knockdown of its individual components resulted in only a modest, 5- to 10-fold rescue in replication of an ICP0 deleted HSV-1 virus (FIG. 5B). Although others have shown that simultaneous knockdown of various components of PML NB such as PML, Sp100 and DAXX yields nearly a 100-fold rescue in lytic replication of HSV-1 ΔICP0 in non-permissive cells (Glass and Everett, J Virol 87, 2174-2185, 2013), this is still far short of the 1000-fold defect in lytic replication seen in primary cells when compared to WT HSV-1 (FIG. 1E). This indicates that although PML NBs play a role in suppression of HSV-1 ΔICP0 lytic replication, there are other cellular factors that contribute to the suppression of HSV-1 ΔICP0. Furthermore, U2OS cells have likely acquired multiple mutations that result in the rescue of lytic replication of an ICP0 deleted HSV-1 virus back to wild type levels.

[0175] While these data demonstrate that PML NBs are in part responsible for the restriction of HSV-1 replication, they do not delineate between restriction due to sequestration and/or restriction due to modification of the viral genome by PML NBs. It was reasoned that if sequestration of HSV-1 viral genomes is sufficient to suppress lytic replication of an ICP0 deleted virus in U2OS cells, then one would expect a lack of co-localization between PML NBs and HSV-1 viral genomes. When immunofluorescence was performed for PML, ICP4 and PNA-TelC in U2OS cells, along the edge of plaques it was observed that viral genomes still associate with PML NBs (FIG. 1G). In addition, association between telomeric repeat DNA and PML NBs in infected U2OS cells was observed, and in some cases, viral genomes, telomeric repeat DNA and PML NBs all co-localized. Taken together, these data indicate that the presence of ECTRs and APBs does not prevent the association of PML NBs with incoming viral genomes. This indicates that the association of HSV-1 viral genomes with PML NBs is not sufficient to restrict HSV-1 replication but that additional modifications to the viral genome or activation of downstream signaling events is required for restriction of lytic replication at low MOI by PML NBs.

Cells that Use ALT for TMM Fail to Transcriptionally Respond to HSV-1 Infection

[0176] Because HSV-1 genomes co-localize with PML NBs in U2OS cells with no adverse effect on viral lytic replication, yet co-localization in non-ALT cells results in restriction, it was reasoned that a fundamental change in the PML NB has occurred in U2OS cells. Furthermore, since disruption of PML NBs via RNAi fails to restore replication of an ICP0 deleted virus back to wild type levels, it suggests that U2OS cells may harbor additional alterations that alleviate restriction of HSV-1 ΔICP0 lytic replication. In addition to the disruption of PML NBs, ICP0 is a potent transactivator of both viral and cellular gene expression during HSV-1 infection (Everett, EMBO J 3, 3135-3141, 1984). It was hypothesized that changes to the cellular transcriptional program upon infection may cooperate with PML NBs to restrict HSV-1 ΔICP0 lytic replication. Loss or alterations to both the PML NBs and cellular transcriptional program in U2OS cells may explain the rescue of lytic replication of an ICP0 deleted HSV-1 virus observed in these cells.

[0177] In order to define the ICP0 induced cellular transcriptional program during HSV-1 infection, a series of RNA-seq and microarray experiments were performed. Since tumor derived cell lines carry large numbers of mutations that may convolute downstream gene expression analysis and potentially affect HSV-1 infection, normal primary small airway epithelial cells (SAEC) were used to obtain a baseline gene expression profile to which all subsequent gene expression profiles would be compared. SAEC were infected with HSV-1 WT or HSV-1 ΔICP0 and total RNA was collected at 8 hours post-infection (hpi). Significantly differentially expressed genes between SAEC infected with HSV-1 ΔICP0 vs SAEC infected with HSV-1 WT were determined using a threshold q-value≥0.05 and a Log 2 fold change≥0.8 or ≤−0.8 (FIG. 2A). By these criteria, 1047 cellular genes were transcriptionally activated (blue) and 1259 cellular genes were transcriptionally suppressed (red) by ICP0 in the context of HSV-1 infection (FIG. 2A). Those genes suppressed by ICP0 (red) were subjected to a hypergeomteric test using the Molecular Signatures Database (MSigDB) in order to calculate overlap with the hallmark gene set. Those genes suppressed by ICP0 showed a significant overlap with genes that are upregulated in response to pro-inflammatory and interferon stimuli. Additionally, downstream targets of p53, cell cycle regulators such as E2F targets and components of the G2/M checkpoint, as well as genes down-modulated in response to UV, were all suppressed by ICP0 during HSV-1 infection (FIG. 2B). A similar analysis in MSigDB using the curated pathways gene sets, which includes canonical signaling pathways from Biocarta, Kegg, Reactome among others, revealed a significant overlap between ICP0 suppressed genes and genes involved in the regulation of telomerase activity (FIG. 2C). Taken together these data begin to assemble a gene signature established during infection that has elements that overlap with pro-inflammatory, interferon, cell cycle, DNA damage signatures as well as telomere maintenance, all of which cooperate to prevent HSV-1 lytic replication in the absence of ICP0.

[0178] It was reasoned that comparing the cellular transcriptional program established by ICP0 in normal primary SAEC to the cellular transcriptional program established by ICP0 in permissive U2OS cells would allow identification of those genes or pathways that cooperate with PML NBs to restrict an ICP0 deleted HSV-1 virus. Furthermore, it was believed these studies could provide further insights into how this signature is altered not only in U2OS cells but also in other cell types that use ALT to maintain telomere length. To this end, U2OS cells were infected with HSV-1 WT or HSV-1 ΔICP0 virus and RNA was collected at 12 hpi, which was subjected to gene expression analysis on an affymetrix GeneChip human gene ST 1.0 microarray. Significantly differentially regulated genes were determined using an adjusted p-value≥0.05 and Log 2 fold change≥0.8 or ≤−0.8 (FIG. 2D). In striking contrast to 2306 differentially regulated genes in SAEC infected cells, 139 genes were transcriptionally activated and only 31 genes were transcriptionally suppressed by ICP0 in U2OS cells in the context of HSV-1 infection. Moreover, when ICP0 suppressed genes from SAEC and U2OS were compared, they exhibited very little overlap, indicating that those genes that are differentially regulated in U2OS are not likely to contribute to the restriction of HSV-1 ΔICP0 (FIG. 2E). Given the small number of genes differentially regulated between HSV-1 ΔICP0 and HSV-1 WT in U2OS cells, coupled with the observed rescue of HSV-1 ΔICP0 lytic replication in these cells suggests that the transcriptional program established by ICP0 during HSV-1 infection in SAEC is genetically phenocopied in U2OS cells. In addition, somatic cell hybridization experiments have demonstrated that the rescue of HSV-1 ΔICP0 lytic replication in U2OS is likely to due to the loss of one or more cellular restriction factors (Hancock et al., Virology 352, 237-252, 2006). This argues that genes or pathways suppressed by ICP0 during HSV-1 infection are the critical factors that act to restrict viral replication and not the ICP0 transcriptionally upregulated genes.

[0179] PML NBs exhibit anti-viral activity towards HSV-1 as well as several other viruses (Everett, Oncogene 20, 7266-7273, 2001). Given the atypical presence of ECTR DNA in ALT cells that associates with and is sequestered by PML NBs, similar to HSV-1 viral genomes, it was hypothesized that the ECTRs may also trigger other anti-viral pathways. Since these pathways would be restrictive to both viral replication and cell growth they would have to be turned off or down-modulated during transformation and the transition to ALT. If true, then this would explain the lack of activation of the restrictive transcriptional profile in U2OS cells that is observed in HSV-1 ΔICP0 infected SAEC (FIG. 2). In addition, if an anti-viral state is initiated in cells transitioning to ALT, which must then be lost, then other cells or tumors that use ALT should also fail to activate the restrictive transcriptional profile upon infection with HSV-1 ΔICP0.

[0180] Total RNA from either the osteosarcoma derived cell line SAOS2 or the breast cancer derived cell line SKBR3 infected with either HSV-1 WT or HSV-1 ΔICP0 was prepared and analyzed by microarray as described above. Applying the same thresholds used for SAEC and U2OS, only 1 gene was significantly differentially expressed between SAOS2 HSV-1 ΔICP0 infected cells and SAOS2 HSV-1 WT infected cells (FIG. 2F). A similar analysis of SKBR3 HSV-1 ΔICP0 infected cells compared to SKBR3 HSV-1 WT infected cells showed only 47 ICP0 transcriptionally activated genes (blue) and 10 ICP0 transcriptionally suppressed genes (red) (FIG. 2G). This further supports the hypothesis that the transition to ALT leads to the inability of these cells to mount an appropriate restrictive anti-viral response.

[0181] In contrast, tumor derived cell lines that use telomerase as their preferred telomere maintenance mechanism (TMM) should behave more similar to the normal primary SAEC cells and activate a similar restrictive anti-viral transcriptional response when infected with HSV-1 ΔICP0 compared to HSV-1 WT. The telomerase-positive osteosarcoma derived cell lines HOS and SJSA1 were infected with either HSV-1 ΔICP0 or HSV-1 WT virus as above and RNA was harvested for gene expression analysis by microarray. Significantly differentially regulated genes were determined using an adjusted p-value≥0.05 and Log2 fold change≥0.58 or ≤−0.58 for HOS cells and Log2 fold change≥1 or ≤−1 for SJSA1. The results demonstrated that 1564 genes were differentially regulated in HOS and 4265 in SJSA1 cells with 1120 genes in HOS and 3359 genes in SJSA1 being transcriptionally suppressed by ICP0. Furthermore, when the overlap between the ICP0 transcriptionally suppressed genes was computed using the hallmark gene sets from MSigDB (as described above), there was an overlap with many of the same gene sets observed when the same analysis was performed on the SAEC expression data. There is a loss in some aspects of the inflammatory and interferon signaling gene sets from both the HOS and SJSA1 expression data sets when compared to SAEC. However, this is not too surprising since tumor cells in general have been reported to be less responsive to interferon signaling and establishment of an anti-viral state (Hummel et al., Mol Ther 12, 1101-1110, 2005). Furthermore, since tumor cells tend to be more permissive to replication of HSV-1 ΔICP0, regardless of TMM, when compared to normal primary cells it is possible that a partial loss of the anti-viral transcriptional program as seen here may account for this partial rescue. Taken together, these data demonstrate that cells that use ALT fail to respond and initiate an anti-viral transcriptional response as seen in normal primary SAEC as well as telomerase positive tumor cell lines.

ALT Cells Fail to Initiate Anti-Viral Response when Challenged by Intracellular DNA

[0182] The data described herein predicts that ALT cells should have a diminished capacity to transcriptionally upregulate interferon stimulated genes (ISG) in response to pathogenic stimuli. Activation of ISGs can occur through extrinsic initiated or intrinsic initiated pathways (Ivashkiv and Donlin, Nat Rev Immunol 14, 36-49, 2014; Schneider, Annu Rev Immunol 32, 513-545, 2014). To test whether the preferred TMM of a cell influences its ability to initiate an appropriate transcriptional response via the extrinsic pathway, a panel of ALT and non-ALT cell lines were treated with varying amounts of interferon-α. Fours hours post addition of IFNα, RNA was collected and the transcriptional induction of several downstream ISGs (IFIT1, IFIT2, IFIT3, OAS1, OAS2 and MX1) were monitored by RT-qPCR as a read out for sensitivity to IFNα. Both telomerase-positive and ALT cells were found to be equally capable of transcriptionally inducing ISGs in response to treatment with IFNα (FIGS. 3A and 6A).

[0183] However, frequently a cell must recognize and respond to invading pathogens from within. This occurs through the detection a pathogens proteins and/or nucleic acids (Schneider et al., Annu Rev Immunol 32, 513-545, 2014; Ivashkiv and Donlin, Nat Rev Immunol 14, 36-49, 2014). Once detected, the cell must mount an appropriate response to contain and limit spread of the pathogen. This typically occurs through the activation of ISGs capable of limiting viral replication and alerting surrounding cells to the potential threat. It was hypothesized that the ECTRs generated during ALT may be mistaken as pathogenic DNA activating a cellular anti-viral response. Prolonged activation of such a response would be deleterious to the cell and would have to be dampened for the cell to fully transition to ALT. Although the response to IFNs in cells dependent on ALT was found to be still intact, it was reasoned that its ability to respond to an internally detected threat might be compromised. To test this, an empty pCDNA3.1 plasmid was introduced into the cell via transfection in order mimic DNA from an invading pathogen, such as HSV-1. RNA was harvested from the cells six hours post-transfection and subjected to RT-qPCR analysis for downstream ISGs as described above. Those cells that use ALT to maintain telomere length exhibited a severely dampened response to plasmid DNA (FIGS. 3B and 6B). However, cells that use telomerase largely induce the expression of downstream ISGs as would be expected (FIGS. 3B and 6B). It was questioned whether this response was specific to circular plasmid DNA or if other forms of extrachromosomal DNA could initiate a similar response. To test this, purified and sheared calf thymus DNA was transfected and activation of ISG effectors was assayed (FIG. 3B). The results demonstrated that the lack of response to foreign extrachromosomal DNA in ALT cells was a general phenomenon regardless of form or source.

[0184] Next, studies were performed to determine whether infection with HSV-1 would recapitulate the differential response of telomerase-positive and ALT-dependent cells when challenged with foreign DNA. Both HOS (tel+) and U2OS (ALT) were infected with either HSV-1 WT or HSV-1 ΔICP0 at an MOI of 1 and incubated for 4 hours. Following treatment with the virus, RNA was harvested from the infected and uninfected cells and subjected to RT-qPCR as described above. HOS cells infected with HSV-1 ΔICP0 exhibited activation of many of the ISG assayed, while U2OS cells infected with HSV-1 ΔICP0 failed to induce transcription of the same ISGs (FIG. 3C). As expected, infection with HSV-1 WT led to the suppression of ISGs transcription in both HOS and U2OS. It was also observed that the induction of the ISGs assayed in response to HSV-1 ΔICP0 infection was not as robust as with IFNα treatment or transfection of DNA. This is likely due to the redundant anti-viral activity of other immediate early HSV-1 genes that are still expressed by HSV-1 ΔICP0, albeit to a lesser extent. Importantly, since HSV-1 deposits the viral genome directly into the nucleus this suggests that the response that is initiated is a result of the detection of the viral DNA in the nucleus and not in the cytoplasm where most DNA sensors have been proposed to function.

[0185] Since many of these ISGs can also be upregulated in response to double-stranded RNA via the toll-like receptor 3 (TLR3), it was examined whether this defect in ALT cells is specific to DNA or extends to foreign RNA as well. To test this, HOS (Tel+) and U2OS (ALT) cells were transfected with the dsRNA mimic PolyI:C. Four hours post-transfection, RNA was harvested from these cells and subjected to RT-qPCR as before. Although ALT cells failed to respond to extrachromosomal DNA, their ability to mount an appropriate transcriptional response to dsRNA was still intact (FIG. 3D).

[0186] Taken together, these data indicate that cells that use ALT as their preferred TMM have lost the ability to initiate and propagate an appropriate anti-viral transcriptional response when challenged with extrachromosomal DNA from within. The RNA-seq and microarray analysis further demonstrated that while this response overlaps with some of the same targets as the interferon response, it also has elements that overlap with inflammatory cytokine signaling, p53, cell cycle regulation, DNA damage response and telomerase signaling. Collectively, these elements come together to generate a potent extrachromosomal DNA induced anti-viral state in the cell. The inventors have termed this anti-viral response the ‘Viral and Extrachromosomal DNA transcriptional response’ or VECTR.

### ALT, gC and ICP0 Functionally Converge

[0187] Loss of the protective anti-viral VECTR response is not only critical for the transition to ALT but indicates that ALT cells may be more susceptible to incoming pathogens than non-ALT cells. Since ICP0 and ALT seem to overlap in their functions, this may explain why U2OS cells rescue replication of an ICP0 null virus. Given these results, the prediction is that cells that use ALT to maintain telomere length should also rescue replication of an ICP0 deleted HSV-1 virus. This was tested by performing a plaque assay on 16 non-ALT and 11 ALT cell lines with both HSV-1 WT and an ICP0 deleted virus. Relative plaque forming efficiency of HSV-1 ΔICP0 virus was calculated by comparing the number of plaques formed at a particular MOI (˜30 plaques/well) to the number of plaques formed in WT virus at that same MOI. No non-ALT cell lines rescued replication of HSV-1 ΔICP0, yet nearly all of the ALT cell lines rescued replication to some degree (FIG. 4A, FIG. 9A, and FIG. 9B). Those cell lines that rescue to a lesser extent are all cell lines that were in vitro transformed. This suggests that there may be additional in vivo selection that occurs, which further renders ALT cells permissive to HSV-1 replication.

[0188] Furthermore, a widely used ICP0 loss mutant HSV-1 (strain name d11403) was found to have an unexpected mutation in its glycoprotein C gene, which is a deletion of 186th cytosine in its coding sequence (see FIG. 10). As a result, glycoprotein C peptide in dICP0 virus has extensive sequence change as well as premature termination at 175th codon.

SEQ ID NO: 17 shows the nucleotide sequence of WT HSV-1 gC from nucleotides 181-200:

(SEQ ID NO: 17)

ACCCCCACATCGACCCCAAA.

SEQ ID NO: 17 shows the mutant gC sequence from HSV-1 strain d11403, from nucleotides 181-199:

(SEQ ID NO: 18)

ACCCCACATCGACCCCAAA.

SEQ ID NO: 19 shows the amino acid sequence of WT HSV-1 gC from amino acid 60-70:

(SEQ ID NO: 19)

VTPTSTPNPNN.

SEQ ID NO: 20 shows the amino acid sequence of HSV-1 strain d11403 gC from amino acid 60-70:

(SEQ ID NO: 20)

VTPHRPQTPTM.

SEQ ID NO: 21 shows the amino acid sequence of WT HSV-1 gC from amino acid 171-180:

(SEQ ID NO: 21)

PAPDLEEVLT.

SEQ ID NO: 22 shows the amino acid of HSV-1 strain d11403 gC from amino acid 171-174:

(SEQ ID NO: 22)

RLPT.

[0189] This loss-of-function mutation of gC (glycoprotein C) in dICP0 HSV-1 is believed to inhibit its invasion efficiency into the cell because gC is a major cell membrane receptor binding protein, compared to its homologous proteins, gA and gB. Since their binding target molecule heparin sulfate is highly expressed in the fibroblast lineage, dICP0 HSV-1 infection ability can be underestimated when infected into such cells. At least in four osteosarcoma cell lines (HOS[TEL+], SJSA1[TEL+], SAOS2[ALT], U2OS[ALT]), the two TEL+ cell lines appear to have more fibroblast-like features, hence, presumably more heparan sulfate on their cell membrane, while ALT cell lines appear to be more epithelial. Thus, recombinant HSV-1 with modified gC, or gC deficient, may have higher selectivity for ALT-dependent tumor cells relative to the surrounding normal fibroblast tissue.

### Discussion

[0190] Previous studies have shown that the loss of p53 and inactivating mutations in ATRX, a component of the PML NB, strongly correlates with ALT (Lovejoy et al., PLoS Genet 8, e1002772, 2012). However, inactivation of either has yet to recapitulate the phenotypes associated with ALT, indicating that additional changes are required for the full transition to ALT. The studies described herein demonstrated that the ECTR DNA that associates with PML NBs plays a critical role in the transition to ALT, thus defining another set of cellular changes required for telomere maintenance via ALT. From these data a model begins to take shape in which the transition to ALT is a multi-step and multi-genic process where any one mutation may not be sufficient.

[0191] It has been proposed that PML NBs facilitate telomere maintenance in ALT as well as sequester ECTRs away from the rest of the cell. This sequestration of ECTRs by PML NBs is thought to prevent the activation of a deleterious DNA damage response. However, it is proposed herein that the association of ECTRs and PML NBs is part of the normal cellular intrinsic immune response. As such, recognition of ECTRs as a potential pathogen leads to the activation and establishment of an anti-viral state in the cell. This may occur through both PML-dependent and PML-independent mechanisms. Continued activation of this response would prevent cellular replication. Therefore, suppression of this anti-viral response would have to occur if the cell were to switch to ALT and complete its malignant transformation (FIG. 4B).

[0192] The studies described herein determined that inhibition of this DNA-specific anti-viral response, termed the VECTR response, phenocopies the activity of the HSV-1 protein ICP0 (FIG. 4B). As a result, ALT cells fail to recognize or respond appropriately to incoming HSV-1 genomes. The result is rescue of lytic replication of an ICP0 deleted HSV-1 virus in ALT dependent tumors. However, it is interesting that the tumor derived ALT cell line rescue of HSV-1 ΔICP0 lytic replication is more pronounced than the in vitro transformed ALT cell lines. This suggests in vivo selective pressures, which are missing when in vitro transformed cells transition to ALT, may further facilitate the transition to ALT.

### Example 3: ALT-Dependent Tumor Xenograft Models

[0193] To assess oncolytic activity of HSV-1 ΔICP0 in vivo, the ALT-dependent osteosarcoma tumor cells SAOS2, which had been stably transduced with a lentiviral vector expressing a CMV driven luciferase reporter gene, were injected into the flanks of nude mice. Growth of the xenograft tumors was monitored by both luciferase activity and by tumor volume. Mice with established tumors were injected with either wild-type HSV-1 or HSV-1 ΔICP0 at Day 0 (5×10⁵ PFU), Day 3 (5×10⁵ PFU) and Day 8 (1×10⁶ PFU). Tumor cell viability, as measured by luciferase activity (FIG. 7A), and tumor cell volume (FIG. 7B) were measured at Days 0, 3, 8, 14, 20, 24, 27, 31 and 36. The results demonstrated that administration of either WT HSV-1 or HSV-1 ΔICP0 reduced tumor volume and eliminated tumor cell viability as demonstrated by the reduction of luciferase activity in the tumors down to background levels. In addition, it was found that HSV-1 ΔICP0 had no adverse effect on the overall health of the mouse, whereas administration of HSV-1 WT led to the death of the mouse after 8 days.

[0194] A second experiment was conducted in SAOS2 xenograft mice. Mice with established tumors were administered either DMEM (as a control), WT HSV-1 or HSV-1 ΔICP0 at Day 0 (5×10⁵ PFU), Day 4 (5×10⁵ PFU) and Day 8 (1×10⁶ PFU). Tumor cell viability (FIG. 7C) and tumor volume (FIG. 7D) were measured at Days 0, 4, 8, 12 and 17. The results demonstrated that administration of either WT HSV-1 or HSV-1 ΔICP0 reduced tumor cell viability and tumor volume.

[0195] Next, A549 cells, which are Tel+ adenocarcinoma tumor cells, were used to establish tumor xenografts in nude mice. Since A549 cells are not ALT-dependent, HSV-1 ΔICP0 is replication defective in these cells. Mice with established tumors were injected with either DMEM (as a control), WT HSV-1 or HSV-1 ΔICP0 at Day 0 (5×10⁵ PFU), Day 3 (5×10⁵ PFU) and Day 7 (1×10⁶ PFU). Tumor cell viability was measured at Days 0, 3, 7, 12 and 16. The results demonstrated that neither WT HSV-1 nor HSV-1 ΔICP0 were able to significantly decrease tumor viability.

### Example 4: Additional Recombinant ICP0-Deficient Viruses

[0196] HSV-1 ICP0 null virus can be modified to include additional gene disruptions, such as disruptions in one or more of the ICP47 gene, the ICP34.5 gene and the ICP6 gene. Recombinant HSV-1 can also be further modified to encode heterologous proteins, such as an immunostimulatory molecule.

[0197] In one example, HSV-1 ΔICP0 is modified to insert a nucleic acid construct that includes the GM-CSF coding region into both TR_{L} and IR_{L}. The GM-CSF coding sequence is operably linked to a CMV promoter and a polyA sequence (FIG. 8, construct 2). The genome sequence of this virus is set forth herein as SEQ ID NO: 15.

[0198] In another example, HSV-1 ΔICP0 is modified as indicated above to insert GM-CSF into both TR_{L} and IR_{L}. The virus is further modified by partial deletion of the ICP47 gene (A1-78 bp) (FIG. 8, construct 3). The partial deletion of ICP47 removes the first 78 bp (encoding 26 amino acids) starting from the ATG start codon. It also removes the rest of the ATG sites downstream that could potentially be used as a start site. The genome sequence of this virus is set forth herein as SEQ ID NO: 16.

[0199] In one example, HSV-1 ΔICP0 is modified to insert a nucleic acid construct that includes the GM-CSF coding region into both TR_{L} and IR_{L}. The GM-CSF coding sequence is operably linked to a CMV promoter and a polyA sequence (FIG. 8, construct 2). The virus is further modified by a point mutation of the gC gene (A168c) (FIG. 10) which results in non-expressing Gc. The genome sequence of this virus is set forth herein as SEQ ID NO: 23.

[0200] In another example, HSV-1 ΔICP0 is modified as indicated above to insert GM-CSF into both TR_{L} and IR_{L}. The virus is further modified by a point mutation of the gC gene (A168c) (FIG. 10) which results in non-expressing Gc. The virus is further modified by partial deletion of the ICP47 gene (A1-78 bp) (FIG. 8, construct 3). The partial deletion of ICP47 removes the first 78 bp (encoding 26 amino acids) starting from the ATG start codon. It also removes the rest of the ATG sites downstream that could potentially be used as a start site. The genome sequence of this virus is set forth herein as SEQ ID NO: 24.

[0201] In view of the many possible embodiments to which the principles of the disclosure may be applied, it should be recognized that the illustrated embodiments are only examples of the disclosure and should not be taken as limiting the scope of the disclosure. Rather, the scope of the disclosure is defined by the following claims. We therefore claim all that comes within the scope and spirit of these claims.

1. A method of treating an alternative lengthening of telomeres (ALT)-dependent cancer in a subject, comprising:
selecting a subject having an ALT-dependent cancer; and
administering to the subject a recombinant herpes simplex virus (HSV)-1 that is infected cell protein 0 (ICP0)-deficient, glycoprotein C (gC)-deficient, or both ICP0-deficient and gC-deficient, thereby treating the ALT-dependent cancer in the subject.

2. The method of claim 1, wherein the recombinant HSV-1 comprises a disruption in the ICP0 gene that diminishes or eliminates expression of functional ICP0.

3. The method of claim 2, wherein:
the disruption in the ICP0 gene is a complete deletion of the ICP0 gene;
the disruption in the ICP0 gene is a partial deletion in the ICP0 gene; or
the disruption in the ICP0 gene is an insertion or a point mutation in the ICP0 gene.

4. The method of claim 3, wherein the partial deletion in the ICP0 gene or the insertion or point mutation in the ICP0 gene is in the RING finger domain coding region.

5. The method of claim 1, wherein the recombinant HSV-1 comprises a gC gene with a deletion of the cytosine at position 186 relative to the gC gene of wild-type HSV-1.

6. The method of claim 1, wherein the recombinant HSV-1 comprises a gC gene with a premature termination at the 175^{th} codon relative to the gC gene of wild-type HSV-1.

7. The method of claim 1, wherein the recombinant HSV-1 further comprises a heterologous gene encoding an immunostimulatory molecule.

8. The method of claim 1, wherein the recombinant HSV-1 further comprises a disruption in the ICP34.5 gene, the ICP6 gene, and/or the ICP47 gene that diminishes or eliminates expression of functional ICP34.5, ICP6 and/or ICP47.

9. The method of claim 8, wherein:
the disruption in the ICP34.5 gene, the ICP6 gene, or the ICP47 gene is a complete deletion of the ICP34.5 gene, the ICP6 gene, or the ICP47 gene;
the disruption in the ICP34.5 gene, the ICP6 gene, or the ICP47 gene is a partial deletion in the ICP34.5 gene, the ICP6 gene, or the ICP47 gene; or
the disruption in the ICP34.5 gene, the ICP6 gene, or the ICP47 gene is an insertion or a point mutation in the ICP34.5 gene, the ICP6 gene, or the ICP47 gene.

10. The method of claim 1, wherein the recombinant HSV-1 comprises a complete deletion of the ICP0 gene and comprises a heterologous gene encoding GM-CSF.

11. The method of claim 10, wherein the recombinant HSV-1 comprises a genome sequence at least 80% identical to SEQ ID NO: 15 or SEQ ID NO: 23.

12. The method of claim 1, wherein the recombinant HSV-1 comprises a complete deletion of the ICP0 gene and a partial deletion of the ICP47 gene, and further comprises a heterologous gene encoding GM-CSF.

13. The method of claim 12, wherein the recombinant HSV-1 comprises a genome sequence at least 80% identical to SEQ ID NO: 16 or SEQ ID NO: 24.

14. The method of claim 1, further comprising administering an anti-cancer therapy to the subject.

15. The method of claim 1, wherein the ALT-dependent cancer is a soft tissue sarcoma, a cancer of the central nervous system, or an osteosarcoma.

16. A recombinant herpes simplex virus (HSV)-1 comprising:
a complete deletion of the infected cell protein 0 (ICP0) gene; and
a heterologous gene encoding granulocyte-macrophage colony-stimulating factor (GM-CSF).

17. The recombination HSV-1 of claim 16, further comprising a mutation of the glycoprotein C (gC) gene, such that the recombinant HSV-1 is gC deficient.

18. The recombinant HSV-1 of claim 17, comprising a genome sequence at least 80% identical to SEQ ID NO: 15 or SEQ ID NO: 23.

19. A recombinant herpes simplex virus (HSV)-1 comprising:
a complete deletion of the infected cell protein 0 (ICP0) gene;
a mutation of the glycoprotein C (gC) gene, such that the recombinant HSV-1 is gC deficient;
a partial deletion in the infected cell protein 47 (ICP47) gene; and
a heterologous gene encoding granulocyte-macrophage colony-stimulating factor (GM-CSF).

20. The recombinant HSV-1 of claim 19, comprising a genome sequence at least 80% identical to SEQ ID NO: 24.

The application's sequence listing, which the Patent Office published only in electronic form, follows.

SEQUENCE LISTING (24 sequences)

SEQ ID NO: 1 - DNA, 21 bp, Artificial Sequence
  Synthetic oligonucleotide
tgtccaaggtggtaaagggtg

SEQ ID NO: 2 - DNA, 20 bp, Artificial Sequence
  Synthetic oligonucleotide
caggtcaccagactcctcac

SEQ ID NO: 3 - DNA, 21 bp, Artificial Sequence
  Synthetic oligonucleotide
aagcacctcaaagggcaaaac

SEQ ID NO: 4 - DNA, 21 bp, Artificial Sequence
  Synthetic oligonucleotide
tcggcccatgtgatagtagac

SEQ ID NO: 5 - DNA, 22 bp, Artificial Sequence
  Synthetic oligonucleotide
tcagaagtctagtcacttgggg

SEQ ID NO: 6 - DNA, 21 bp, Artificial Sequence
  Synthetic oligonucleotide
acaccttcgccctttcatttc

SEQ ID NO: 7 - DNA, 21 bp, Artificial Sequence
  Synthetic oligonucleotide
tgtccaaggtggtaaagggtg

SEQ ID NO: 8 - DNA, 21 bp, Artificial Sequence
  Synthetic oligonucleotide
ccggcgatttaactgatcctg

SEQ ID NO: 9 - DNA, 19 bp, Artificial Sequence
  Synthetic oligonucleotide
aggtggctcctatggacgg

SEQ ID NO: 10 - DNA, 22 bp, Artificial Sequence
  Synthetic oligonucleotide
tttatcgaggatgtcacgttgg

SEQ ID NO: 11 - DNA, 20 bp, Artificial Sequence
  Synthetic oligonucleotide
cagcacctgatggcctatca

SEQ ID NO: 12 - DNA, 22 bp, Artificial Sequence
  Synthetic oligonucleotide
acgtctggagcatgaagaactg

SEQ ID NO: 13 - DNA, 24 bp, Artificial Sequence
  Synthetic oligonucleotide
ttcgacagtcagccgcatcttctt

SEQ ID NO: 14 - DNA, 23 bp, Artificial Sequence
  Synthetic oligonucleotide
caggcgcccaatacgaccaaatc

SEQ ID NO: 15 - DNA, 151382 bp, Artificial Sequence
  Recombinant HSV-1 vector
agcccgggccccccgcgggcgcgcgcgcgcgcaaaaaaggcgggcggcggtccgggcggcgtgcgcgcgcgcggcgggcgtggggggcggggccgcgggagcggggggaggagcggggggaggagcggggggaggagcggggggaggagcggggggaggagcggggggaggagcggggggaggagcggggggaggagcggggggaggagcggggggaggagcggggggaggagcggggggaggagcggggggaggagcggggggaggagcggggggaggagcggggggaggagcggggggaggagcggggggaggagcggccagaccccgaaaacgggccccccccaaaacacaccccccgggggtcgcgcgcggccctttaaagcggcggcggcgggcagcccgggccccccgcggccgagactagcgagttagacaggcaagcactactcgcctctgcacgcacatgcttgcctgtcaaactctaccaccccggcacgctctctgtctccatggcccgccgccgccgccatcgcggcccccgccgcccccggccgcccgggcccacgggcgccgtcccaaccgcacagtcccaggtaacctccacgcccaactcggaacccgcggtcaggagcgcgcccgcggccgccccgccgccgccccccgccggtgggcccccgccttcttgttcgctgctgctgcgccagtggctccacgttcccgagtccgcgtccgacgacgacgatgacgacgactggccggacagccccccgcccgagccggcgccagaggcccggcccaccgccgccgccccccggccccggcccccaccgcccggcgtgggcccggggggcggggctgacccctcccaccccccctcgcgccccttccgccttccgccgcgcctcgccctccgcctgcgcgtcaccgcggagcacctggcgcgcctgcgcctgcgacgcgcgggcggggagggggcgccggagccccccgcgacccccgcgacccccgcgacccccgcgacccccgcgacccccgcgcgggtgcgcttctcgccccacgtccgggtgcgccacctggtggtctgggcctcggccgcccgcctggcgcgccgcggctcgtgggcccgcgagcgggccgaccgggctcggttccggcgccgggtggcggaggccgaggcggtcatcgggccgtgcctggggcccgaggcccgtgcccgggccctggcccgcggagccggcccggcgaactcggtctaacgttacacccgaggcggcctgggtcttccgcggagctcccgggagctccgcaccaagccgctctccggagagacgatggcaggagccgcgcatatatacgcttggagccagcccgccctcacagggcgggcccgcctcgggggcgggactggccaatcggcggccgccagcgcggcggggcccggccaaccagcgtccgccgagtcttcggggcccggcccattgggcgggagttaccgcccaatgggccgggccgcccacttcccggtatggtaattaaaaacttgcaagaggccttgttccgcttcccggtatggtaattagaaactcattaatgggcggccccggccgcccttcccgcttccggcaattcccgcggcccttaatgggcaaccccggtattccccgcctcccgcgccgcgcgtaaccactcccctggggttccgggttatgctaattgcttttttggcggaacacacggcccctcgcgcattggcccgcgggtcgctcaatgaacccgcattggtcccctggggttccgggtatggtaatgagtttcttcgggaaggcgggaagccccggggcaccgacgcaggccaagcccctgttgcgtcggcgggaggggcatgctaatggggttctttgggggacaccgggttgggcccccaaatcgggggccgggccgtgcatgctaatgatattctttgggggcgccgggttggtccccggggacggggccgccccgcggtgggcctgcctcccctgggacgcgcggccattgggggaatcgtcactgccgcccctttggggaggggaaaggcgtggggtataagttagccctggcccgacagtctggtcgcatttgcacctcggcactcggagcgagacgcagcagccaggcagactcgggccgccccctctccgcatcaccacagaagccccgcctacgttgcgacccccagggaccctccgtccgcgaccctccagccgcatacgacccccagttattaatagtaatcaattacggggtcattagttcatagcccatatatggagttccgcgttacataacttacggtaaatggcccgcctggctgaccgcccaacgacccccgcccattgacgtcaataatgacgtatgttcccatagtaacgccaatagggactttccattgacgtcaatgggtggagtatttacggtaaactgcccacttggcagtacatcaagtgtatcatatgccaagtacgccccctattgacgtcaatgacggtaaatggcccgcctggcattatgcccagtacatgaccttatgggactttcctacttggcagtacatctacgtattagtcatcgctattaccatggtgatgcggttttggcagtacatcaatgggcgtggatagcggtttgactcacggggatttccaagtctccaccccattgacgtcaatgggagtttgttttggcaccaaaatcaacgggactttccaaaatgtcgtaacaactccgccccattgacgcaaatgggcggtaggcgtgtacggtgggaggtctatataagcagagctcgtttagtgaaccgtcagatcgatgtggctgcagagcctgctgctcttgggcactgtggcctgcagcatctctgcacccgcccgctcgcccagccccagcacgcagccctgggagcatgtgaatgccatccaggaggcccggcgtctcctgaacctgagtagagacactgctgctgagatgaatgaaacagtagaagtcatctcagaaatgtttgacctccaggagccgacctgcctacagacccgcctggagctgtacaagcagggcctgcggggcagcctcaccaagctcaagggccccttgaccatgatggccagccactacaagcagcactgccctccaaccccggaaacttcctgtgcaacccagattatcacctttgaaagtttcaaagagaacctgaaggactttctgcttgtcatcccctttgactgctgggagccagtccaggagtgaaataaagcaatagcatcacaaatttcacaaataaagcattattttgtgaggcggggggcggcaaggaccctgggggaggaggaggaggagggggggggagggaggaataggcgggcgggcgaggaaagggcgggccggggagggggcgtaacctgatcgcgccccccgttgtctcttgcagcagactacgtaccgcccgccccccgccggacgccccgcgcccccccacgcagaggcgccgccgcgccccccgtgacgggcggggcgtctcacgcagccccccagccggccgcggctcggacagcgcccccctcggcgcccatcgggccacacggcagcagtaacaccaacaccaccaccaacagcagcggcggcggcggctcccgccagtcgcgagccgcggcgccgcggggggcgtctggcccctccgggggggttggggttggggttggggttgttgaagcggaggcggggcggccgaggggccggacgggcccccttgtcaacagacccgccccccttgcaaacaacagagaccccatagtgatcagcgactcccccccggcctctccccacaggccccccgcggcgcccatgccaggctccgccccccgccccgggccccccgcgtccgcggccgcgtcgggacccgcgcgcccccgcgcggccgtggccccgtgcgtgcgagcgccgcctccggggcccggcccccgcgccccggcccccggggcggagccggccgcccgccccgcggacgcgcgccgtgtgccccagtcgcactcgtccctggctcaggccgcgaaccaagaacagagtctgtgccgggcgcgtgcgacggtggcgcgcggctcgggggggccgggcgtggagggtgggcacgggccctcccgcggcgccgccccctccggcgccgccccgctcccctccgccgcctctgtcgagcaggaggcggcggtgcgtccgaggaagaggcgcgggtcgggccaggaaaacccctccccccagtccacgcgtccccccctcgcgccggcaggggccaagagggcggcgacgcaccccccctccgactcagggccgggggggcgcggccagggtgggcccgggacccccctgacgtcctcggcggcctccgcctcttcctcctctgcctcttcctcctcggccccgacccccgcgggggccgcctcttccgccgccggggccgcgtcctcctccgcttccgcctcctcgggcggggccgtcggtgccctgggagggagacaagaggaaacctccctcggcccccgcgctgcttctgggccgcgggggccgaggaagtgtgcccggaagacgcgccacgcggagacttccggggccgtccccgcgggcggcctcacgcgctacctgcccatctcgggggtctctagcgtggtcgccctgtcgccttacgtgaacaagactatcacgggggactgcctgcccatcctggacatggagacggggaacatcggggcgtacgtggtcctggtggaccagacgggaaacatggcgacccggctgcgggccgcggtccccggctggagccgccgcaccctgctccccgagaccgcgggtaaccacgtgatgccccccgagtacccgacggcccccgcgtcggagtggaacagcctctggatgacccccgtggggaacatgctgttcgaccagggcaccctagtgggcgccctggacttccgcagcctgcggtctcggcacccgtggtccggggagcagggggcgtcgacccgggacgagggaaaacaataagggacgccccccgtgtttgtggggaggggggggtcgggcgctgggtggtctctggccgcgcccactacaccagccaatccgtgtcggggaggggaaaagtgaaagacacgggcaccacacaccagcgggtcttttgtgttggccctaataaaaaaaaactcaggggatttttgctgtctgttgggaaataaaggtttacttttgtatcttttccctgtctgtgttggatgtatcgcggggatgcgtgggagtgggggtgcgtgggagtgggggtgcgtgggagtgggggtgcgtgggagtgggggtgcgtgggagtgggggtgcgtgggagtgggggtgcgtgggagtgggggtgcgtgggagtgggggtgcgtgggagtgggggtgccatgttgggcaggctctggtgttaaccacagagccgcggcccgggctgcctgaccaccgatccccgaaagcatcctgccactggcatggagccagaaccacagtgggttgggtgtgggtgttaagtttccgcgagcgcctgcccgcccggactgacctggcctctggccgccacaaagggcggggggggttaactacactatagggcaacaaaggatgggaggggtggcggggcgggacggggcgcccaaaagggggtcggccacaccacagacgtgggtgttggggggtggggcggaggggtgggggggggggagacagaaacaggaacatagttagaaaacaagaatgcggtgcagccagagaatcacaggagacgaggggatgggcgtgttggttaccaacccacacccaggcatgctcggtggtatgaaggagggggggcggtgcttcttagagaccgccgggggacgtggggttggtgtgcaaaggcacgcgcacccgcgccggccaggtgggccggtactccatccccccctcccccgacccttcccacccccgcgtgccagagatcaccccggtcccccggcacccgccactcctccgtatcctcgctttaggaacaactttagggggggtacacacgcgccgtgcatttccttccacaccccccctcccccgcactccccccccccaggcagtaagacccaagcatagagagccaggcacaaaaacacaggcggggtgggacacatgccttcttggagtacgtgggtcattggcgtggggggttacagcgacaccggccgaccccctggcggtcttccagccggcccttagataagggggcagttggtggtcggacgggtaagtaacagagtctgactaagggtgggagggggggaaaagaacgggctggtgtgctgtaacacgagcccacccgcgagtggcgtggccgaccttagcctctggggcgccccctgtcgtttgggtcccccccctctattggggagaagcaggtgtctaacctacctggaaacgcggcgtctttgttgaacgacaccggggcgccctcgacgagtgggataacgggggaggaagggagggaggagggtactgggggtgaagaaggggggggggagaagcgagaacaggaaaggcgatggagcccggcagaacaccgaggaaaaaaaaaccacagcgcatgcgccgggccgttgtggggccccgggccggggccccttgggtccgccggggccccgggccgggccgccacgggggccggccgttggcggtaaccccgagtgttcatctcaggccccgggccgggaacccggaaaagcctccggggggcctttttcgcgtcgcgtgccggcgagcgggtccggacggggcccggaccgccgcggtcgggggcccctcgtcccgggccgtacgcggccttcgccccgtgaggggacagacgaacgaaacattccggcgacggaacgaaaaacaccccagacgggttaaagaaacagaaaccgcaacccccaccacccccgaaacggggaaaacgaaaaaacagaccagcggccggccggcgcttagggggaggatgtcgccgacgccccttggccgccccggctgcaggggggcccggagagccgcggcacccggacgcgcccggaaagtctttcgcaccacccgcgatcggcacggccgcgcccccgcttttataaaggctgagatgacgcagcaaaaacaggccacagcaccacgtgggtaggtgatgtaattttattttcctcgtctgcggcctaatggatttccgggcgcggtgcccctgtctgcagagcacttaacggattgatatctcgcgggcacgcgcgcccttaatggaccggcgcggggcggggggccggatacccacacgggcggggggggggtgtcgcgggccgtctgctggcccgcggccacataaacaatgactctgggcctttctgcctctgccgcttgtgagtgcgcgcgccggctctgcggtgtcggcggcggctgcggcggctgcggcggccgccgtgttcggtctcggtagccggccggcgggtggactcgcggggggccggagggtggaaggcaggggggtgtaggatgggtatcaggacttccacttcccgtccttccatcccccgttcccctcggttgttcctcgcctcccccaacaccccgccgctttccgttggggttgttattgttgtcgggatcgtgcgggccgggggtcgccggggcaggggcgggggcgtgggcgggggtgctcgtcgatcgaccgggctcagtgggggcgtggggtgggtgggagaaggcgaggagactggggtgggggtgtcggtgggtggttgttttttgtggttgtttttgtgtctgttcccgtcccccgtcaccccctccctccgtcccctccgtccccccgtcgcgggtgtttgtgtttgtttattccgacattggtttatttaaataaacacagccgttctgcgtgtctgttcttgcgtgtggctgggggcttatatgtggggtcccgggggcgggatggggtttagcggcggggggcggcgcgccggacggggcgctggagataacggcccccggggaacgggggaccggggctgggtatcccgaggtgggtgggtgggcggcggtggccgggccgggccgggccgggccgggccgggtgggcggggtttggaaaaacgaggaggaggaggagaaggcgggggggggggagacggggggaaagcaaggacacggcccggggggtgggagcgcgggccgggccgctcgtaagagccgcgacccggccgccggggagcgttgtcgccgtcggtctgccggcccccgtccctcccttttttgaccaaccagcgccccccccccctcaccaccattcctactaccaccaccaccaccaccaccgacacctcccgcgcacccccgcccacatccccccccaacccgcaccaccagcacgggttgggggtagcaggggatcaaaggggggcaaagccggcggggcggttcggggggggggggggggggcgggagaccaagtaggcccgcccatccgcggcccctcccggcagccacgcccccagcgtcgggtgtcacggggaaagagcagaggggagaggggagagggggggagaggggagagggggggagaggggagagggggggagaggggagagggggggagaggggagagggggggagaggggagagggggggagaggggagagggggggagaggggagagggggggagaggggagagggggggagaggggagagggggggagagggggtatataaaccaacgaaaagcgcgggaacggggatacggggcttgtgtggcacgacgtcgtggttgtgttactgggcaaacacttggggactgtaggtttctgtgggtgccgaccctaggcgctatggggattttgggttgggtcgggcttattgccgttggggttttgtgtgtgcgggggggcttgccttcaaccgaatatgttattcggagtcgggtggctcgagaggtgggggatatattaaaggtgccttgtgtgccgctcccgtctgacgatcttgattggcgttacgagaccccctcggctataaactatgctttgatagacggtatatttttgcgttatcactgtcccggattggacacggtcttgtgggataggcatgcccagaaggcatattgggttaacccctttttatttgtggcgggttttttggaggacttgagttaccccgcgtttcctgccaacacccaggaaacagaaacgcgcttggccctttataaagagatacgccaggcgctggacagtcgcaagcaggccgccagccacacacctgtgaaggctgggtgtgtgaactttgactattcgcgcacccgccgctgtgtagggcgacaggatttgggacctaccaacggaacgtctggacggaccccggttctgccgccggacgatgaagcgggcctgcagccgaagcccctcaccacgccgccgcccatcatcgccacgtcggaccccaccccgcgacgggacgccgccacaaaaagcagacgccgacgaccccactcccggcgcctctaacgatgcctcgacggaaacccgtccgggttcggggggcgaaccggccgcctgtcgctcgtcagggccggcgggcgctcctcgccgccctagaggctgtcccgctggtgtgacgttttcctcgtccgcgccccccgaccctcccatggatttaacaaacgggggggtgtcgcctgcggcgacctcggcgcctctggactggaccacgtttcggcgtgtgtttctgatcgacgacgcgtggcggcccctgatggagcctgagctggcgaaccccttaaccgcccacctcctggccgaatataatcgtcggtgccagaccgaagaggtgctgccgccgcgggaggatgtgttttcgtggactcgttattgcacccccgacgaggtgcgcgtggttatcatcggccaggacccatatcaccaccccggccaggcgcacggacttgcgtttagcgtgcgcgcgaacgtgccgcctcccccgagtcttcggaatgtcttggcggccgtcaagaactgttatcccgaggcacggatgagcggccacggttgcctggaaaagtgggcgcgggacggcgtcctgttactaaacacgaccctgaccgtcaagcgcggggcggcggcgtcccactctagaatcggttgggaccgcttcgtgggcggagttatccgccggttggccgcgcgccgccccggcctggtgtttatgctctggggcacacacgcccagaatgccatcaggccggaccctcgggtccattgcgtcctcaagttttcgcacccgtcgcccctctccaaggttccgttcggaacctgccagcatttcctcgtggcgaaccgatacctcgagacccggtcgatttcacccatcgactggtcggtttgaaaggcatcgacgtccggggtttttgtcggtgggggcttttgggtatttccgatgaataaagacggttaatggttaaacctctggtctcatacgggtcggtgatgtcgggcgtcgggggagagggagttccctctgcgcttgcgattctagcctcgtggggctggacgttcgacacgccaaaccacgagtcggggatatcgccagatacgactcccgcagattccattcggggtgccgctgtggcctcacctgaccaacctttacacgggggcccggaacgggaggccacagcgccgtctttctccccaacgcgcgcggatgacggcccgccctgtaccgacgggccctacgtgacgtttgataccctgtttatggtgtcgtcgatcgacgaattagggcgtcgccagctcacggacaccatccgcaaggacctgcggttgtcgctggccaagtttagcattgcgtgcaccaagacctcctcgttttcgggaaacgccccgcgccaccacagacgcggggcgttccagcgcggcacgcgggcgccgcgcagcaacaaaagcctccagatgtttgtgttgtgcaaacgcgcccacgccgctcgagtgcgagagcagcttcgggtcgttattcagtcccgcaagccgcgcaagtattacacgcgatcttcggacgggcggctctgccccgccgtccccgtgttcgtccacgagttcgtctcgtccgagccaatgcgcctccaccgagataacgtcatgctggcctcgggggccgagtaaccgccccccccccatgccaccctcactgcccgtcgcgcgtgtttgatgttaataaataacacataaatttggctggttgtttgttgtctttaatggaccgcccgcaagggggggggggcatttcagtgtcgggtgacgagcgcgatccggccgggatcctaggaccccaaaagtttgtctgcgtattccagggcggggctcagttgaatctcccgcagcacctctaccagcaggtccgcggtgggctggagaaactcggccgtcccggggcaggcggttgtcgggggtggaggcgcggcgcccaccccgtgtgccgcgcctggcgtctcctctgggggcgacccgtaaatggttgcagtgatgtaaatggtgtccgcggtccagaccacggtcaaaatgccggccgtggcgctccgggcgctttcgccgcgcgaggagctgacccaggagtcgaacggatacgcgtacatatgggcgtcccacccgcgttcgagcttctggttgctgtcccggcctataaagcggtaggcacaaaattcggcgcgacagtcgataatcaccaacagcccaatgggggtgtgctggataacaacgcctccgcgcggcaggcggtcctggcgctcccggccccgtaccatgatcgcgcgggtgccgtactcaaaaacatgcaccacctgcgcggcgtcgggcagtgcgctggtcagcgaggccctggcgtggcataggctatacgcgatggtcgtctgtggattggacatctcgcggtgggtagtgagtcccccgggccgggttcggtggaactgtaaggggacggcgggttaatagacaatgaccacgttcggatcgcgcagagccgatagtatgtgctcactaatgacgtcatcgcgctcgtggcgctcccggagcggatttaagttcatgcgaaggaattcggaggaggtggtgcgggacatggccacgtacgcgctgttgaggcgcaggttgccgggcgtaaagcagatggcgaccttgtccaggctaaggccctgggagcgcgtgatggtcatggcaagcttggagctgatgccgtagtcggcgtttatggccatggccagctccgtagagtcaatggactcgacaaactcgctgatgttggtgttgacgacggacatgaagccgtgttggtcccgcaagaccacgtaaggcaggggggcctcttccagtaactcggccacgttggccgtcgcgtgccgcctccgcagctcgtccgcaaaggcaaacacccgtgcgtacgtgtatcccatgagcgtataattgtccgtctgcagggcgacggacatcagccccccgcgcggcgagccggtcagcatctcgcagccccggaagataacgttgtccacgtacgtgctaaagggggcgacttcaaatgcctccccgaagagctcttggaggattcggaatctcccgaggaaggcccgcttcagcagcgcaaactgggtgtgaacggcggcggtggtctccggttccccgggggtgtagtggcagtaaaacacgtcgagctgttgttcgtccagccccgcgaaaataacgtcgaggtcgtcgtcgggaaaatcgtccgggcccccgtcccgcggccccagttgcttaaaatcaaacgcacgctcgccgggggcgcctgcgtcggccattaccgacgcctgcgtcggcacccccgaagatttggggcgcagagacagaatctccgccgttagttctcccatgcgggcgtaggcgagggtcctctgggtcgcatccaggcccgggcgctgcagaaagttgtaaaaggagataagcccgctaaatatgagccgcgacaggaacctgtaggcaaactccaccgaagtctccccctgagtctttacaaagctgtcgtcacgcaacactgcctcgaaggcccggaacgtcccactaaacccaaaaaccagttttcgcaggcgcgcggtcaccgcgatctggctgttgaggacgtaagtgacgtcgttgcgggccacgaccagctgctgtttgctgtgcacctcgcagcgcatgtgccccgcgtcctggtcctggctctgcgagtagttggtgatgcggctggcgttggccgtgagccacttttcaatcgtcaggccgggctggtgtgtcagccgtcggtattcgtcaaactccttgaccgacacgaacgtaagcacggggagggtgaacacgacgaactccccctcacgggtcaccttcaggtaggcgtggagcttggccatgtacgcgctcacctctttgtgggaggagaacagccgcgtccagccggggaggttggcggggttggtgatgtagttttccgggacgacgaagcgatccacgaactgcatgtgctcctcggtgatgggcaggccgtactccagcaccttcatgaggttaccgaactcgtgctcgacgcaccgtttgttgttaataaaaatggcccagctatacgagaggcgggcgtactcgcgcagcgtgcggttgcagatgaggtacgtgagcacgttctcgctctggcggacggaacaccgcagtttctggtgctcgaaggtcgactccagggacgccgtctgcgtcggcgagcccacacacaccaacacgggccgcaggcgggccgcgtactggggggtgtggtacagggcgttaatcatccaccagcaatacaccacggccgtgaggaggtgacgcccaaggagcccggcctcgtcgatgacgatcacgttgctgcgggtaaaggccggcagcgccccgtgggtggccggggccaaccgcgtcagggcgccctcggccaaccccagggtccgttccagggcggccagggcgcgaaactcgttccgcaactcctcgcccccggaggcggccagggcgcgcttcgtgaggtccaaaatcacctcccagtagtacgtcagatctcgtcgctgcaggtcctccagcgaggcggggttgctggtcagggtgtacgggtactgtcccagttgggcctggacgtgattcccgcgaaacccaaattcatgaaagatggtgttgatgggtcggctgagaaaggcgcccgagagtttggcgtacatgttttgggccgcaatgcgcgtggcgcccgtcaccacacagtccaagacctcgttgattgtctgcacgcacgtgctctttccggagccagcgttgccggtgataagatacaccgcgaacggaaactccctgaggggcaggcctgcgggggactctaaggccgccacgtcccggaaccactgcagatggggcacttgcgctccgtcgagctgttgttgcgagagctctcggatgcgcttaaggattggctgcaccccgtgcatagacgtaaaatttaaaaaggcctcggccctccctggaacggctggtcggtccccgggttgctgaaggtgcggcgggccgggtttctgtccgtctagctggcgctccccgccggccgccgccatgaccgcaccacgctcgcgggcccccactacgcgtgcgcggggggacacggaagcgctgtgctcccccgaggacggctgggtaaaggttcaccccacccccggtacgatgctgttccgcgagattctccacgggcagctggggtataccgagggccagggggtgtacaacgtcgtccggtccagcgaggcgaccacccggcagctgcaggcggcgatctttcacgcgctcctcaacgccaccacttaccgggacctcgaggcggactggctcggccacgtggcggcccgcggtctgcagccccaacggctggttcgccggtacaggaacgcccgggaggcggatatcgccggggtggccgagcgggtgttcgacacgtggcggaacacgcttaggacgacgctgctggactttgcccacgggttggtcgcctgctttgcgccgggcggcccgagcggcccgtcaagcttccccaaatatatcgactggctgacgtgcctggggctggtccccatattacgcaagcgacaagaagggggtgtgacgcagggtctgagggcgtttctcaagcagcacccgctgacccgccagctggccacggtcgcggaggccgcggagcgcgccggccccgggttttttgagctggcgctggccttcgactccacgcgcgtggcggactacgaccgcgtgtatatctactacaaccaccgccggggcgactggctcgtgcgagaccccatcagcgggcagcgcggagaatgtctggtgctgtggccccccttgtggaccggggaccgtctggtcttcgattcgcccgtccagcggctgtttcccgagatcgtcgcgtgtcactccctccgggaacacgcgcacgtctgccggctgcgcaataccgcgtccgtcaaggtgctgctggggcgcaagagcgacagcgagcgcggggtggccggtgccgcgcgggtcgttaacaaggtgttgggggaggacgacgagaccaaggccgggtcggccgcctcgcgcctcgtgcggcttatcatcaacatgaagggcatgcgccacgtaggcgacattaacgacaccgtgcgtgcctacctcgacgaggccggggggcacctgatagacgccccggccgtcgacggtaccctccctggattcggcaagggcggaaacagccgcgggtctgcgggccaggaccagggggggcgggcgccgcagcttcgccaggccttccgcacggccgtggttaacaacatcaacggcgtgttggagggctatataaataacctgtttggaaccatcgagcgcctgcgcgagaccaacgcgggcctggcgacccaattgcaggagcgcgaccgcgagctccggcgcgcaacagcgggggccctggagcgccagcagcgcgcggccgacctggcggccgagtccgtgaccggtggatgcggcagccgccctgcgggggcggacctgctccgggccgactatgacattatcgacgtcagcaagtccatggacgacgacacgtacgtcgccaacagctttcagcacccgtacatcccttcgtacgcccaggacctggagcgcctgtcgcgcctctgggagcacgagctggtgcgctgttttaaaattctgtgtcaccgcaacaaccagggccaagagacgtcgatctcgtactccagcggggcgatcgccgcattcgtcgccccctactttgagtcagtgcttcgggccccccgggtaggcgcgcccatcacgggctccgatgtcatcctgggggaggaggagttatgggatgcggtgtttaagaaaacccgcctgcaaacgtacctgacagacatcgcggccctgttcgtcgcggacgtccagcacgcagcgctgcccccgcccccctccccggtcggcgccgatttccggcccggcgcgtccccgcggggccggtccagatcgcggtcgcccggaagaactgcgcgaggcgcgccggaccagggcgggggcatcgggcaccgggatggccgccgcgacggccgacgatgaggggtcggccgccaccatcctcaagcaggccatcgccggggaccgcagcctggtcgaggcggccgaggcgattagccagcagacgctgctccgcctggcctgcgaggtgcgccaggtcggcgaccgccagccgcggtttaccgccaccagcatcgcgcgcgtcgacgtcgcgcctgggtgccggttgcggttcgttctggacgggagtcccgaggacgcctatgtgacgtcggaggattactttaagcgctgctgcggccagtccagttatcgcggcttcgcggtggcggtcctgacggccaacgaggaccacgtgcacagcctggccgtgccccccctcgttctgctgcaccggttctccctgttcaaccccagggacctcctggactttgagcttgcctgtctgctgatgtacctggagaactgcccccgaagccacgccaccccgtcgacctttgccaaggttctggcgtggctcggggtcgcgggtcgccgcacgtccccattcgaacgcgttcgctgccttttcctccgcagttgccactgggtcctaaacacactcatgttcatggtgcacgtaaaaccgttcgacgacgagttcgtcctgccccactggtacatggcccggtacctgctggccaacaacccgccccccgttctctcggccctgttctgtgccaccccgacgagctcctcattccggctgccggggccgcccccccgctccgactgcgtggcctataaccccgccgggatcatggggagctgctgggcgtcggaggaggtgcgcgcgcctctggtctattggtggctttcggagaccccaaaacgacagacgtcgtcgctgttttatcagttttgttgaattttaggaaataaacccggttttgtttctgtggcctcccgacggatgcgcgtgtccttactccgtcttggtgggtgggtggctgtgtatggcgtcccatctgtgcggggaggggggcaagtcggcacgtattcggacagactcaagcacacacgggggagcgctcttgtctcagggcaatgtttttattggtcaaactcaggcaaacagaaacgacatcttgtcgtcaaagggatacacaaacttccccccctcgccccatactcccgccagcaccccggtaaacaccaactcaatctcgcgcaggatttcgcgcaggtgatgagcgcagtccacgggggggagcacaaggggccgcgggtatagatcgacggggacgccgaccgactccccgcctccgggacagacacgcacgacgcgccgccagtagtgctctgcgtccagcaaggcgccgccgcggaaggcagtggggggcaaggggtcgctggcctcaaagggggacacccgaacgctccagtactccgcgtccaaccgtttattaaacgcgtccaagataaggcggtcgcaggcgtcctccataaggccccgggccgtgagtgcgtcctcctccggcacgcatgccgttgtcaggcccaggacccgtcgcagcgtgtcgcgtacgacccctgccgccgtggtgtacgcgggcccgcggagaggaaatcccccaagatggtcagtgttgtcgcgggagttccagaaccacactcccgcctggctccaggcgactgcgtgggtgtagacgccctcgagggccaggcacagtgggtgccgcagccggaggccgttggccctaagcacggctcccacggccgtctcgatggcccgccgggcgtcctcgatcaccccggaagccgcatccgcgtcttgggggtccacgttaaagacaccccagaacgcacccccatcgcccccgcagaccgcgaacttcaccgagctggccgtctcctcgatctgcaggcagacggcggccattaccccacccaggagctgccgcagcgcagggcaggcgttgcacgtgtccgggaccaggcgctccaagacggccccggcccagggctctgagggagcggccaccaccagcgcgtccagtcttgctaggcccgtccggccgtgggggtccgccagcccgctccccccgaggtcggccagggccgccaggagctgggcgcgaagtccggggaagcaaaaccgcgccgtccagacgggcccgacggccgcgggcgggtctaacagttggatgattttagtggcgggatgccaccgcgccaccgcctcccgcaccgcgggcaggaggcatccggctgccgccgaggccacgccgggccaggctcgcggggggaggacgaccctggcccccaccgcgggccaggcccccaggagcgcggcgtaagcggccgcggccccgcgcaccaggtcccgtgccgactcggccgtggccggcacggtgaacgtgggccaacccggaaaccccaggacggcaaagtacgggacgggtcccccccggacctcaaactcgggccccagaaaggcaaagacgggggccagggccccgggggcggcgtggaccgtggtatgccactgccggaaaagggcgacgagcgccggcgcggagaacttctcgccggcgcttacaaagtagtcgtaatcgcggggcagcagcacccgtgccgtgactcgttgcgggtgcccgcgtggccgcaggcccacctcgcacacctcgaccaggtccccgaacgcgccctccttcttgatcggcggaaacgcaagagtctggtattcgcgcgcaaatagcgcggttccggtggtgatgttaacggtcagcgaagcggcggacgcgcactggggggtgtcgcgaatggccgccaggcgcgcccacgccagccgcgcgtcgggatgctcggcaacgcgcgccgccagggccatagggtcgatgtcaatgttggcctccgcgaccaggagagcggcgcgaggggcggcgggcgggccccacgacgctctctcaactttcaccaccagtcccgtgcgtgggtccgagccgatacgcagcggggcgaacagggccaccggcccggtctggcgctccagggccgccaggacgcacgcgtacagcgcccgccacagagtcgggttctccaggggctccagcggggaggcggccggcgtcgtcgcggcgcgggcggccgccacgacggcctggacggagacgtccgcggagccgtagaaatcccgcagctccgtcgcggtgacggagacctccgcaaagcgcgcgcgaccctcccctgcggcgttgcgacatacaaaatacaccagggcgtggaagtactcgcgagcgcgggggggcagccataccgcgtaaagggtaatggcgctgacgctctcctccacccacacgatatctgcggtgtccatcgcacggcccctaaggatcacgggcggtctgtgggtcccatgctgccgtgcctggccgggcccggtgggtcgcggaaaccggtgacggggggggggcggtttttggggttggggtgggggtgggaaacggcccgggtccgggggccaacttggcccctcggtgcgttccggcaacagcgccgccggtccgcggacgaccacgtaccgaacgagtgcggtcccgagacttatagggtgctaaagttcaccgccccctgcatcatgggccaggcctcggtggggagctccgacagcgccgcctccaggatgatgtcagcgttggggttggcgctggatgagtgcgtgcgcaaacagcgcccccacgcgggcacgcgtagcttgaagcgcgcgcccgcaaactcccgcttgtgggccataagcagggcgtacagctgcctgtgggtccggcaggcgctgtggtcgatgtggtgggcgtccaacaaccccacgattgtctgtttggtgaggtttttaacgcgccccgccccgggaaacgtctgcgtgcttttggccatctgcacgccaaacagttcgccccagattatcttgaacagcgccaccgcgtggtccgtctcgctaacggacccgcgcgggggacagccgcttagggcgtcggcgacgcgcttgacggcttcctccgagagcagaagtccgtcggttacgttacagtggcccagttcgaacaccagctgcatgtagcggtcgtagtggggggtcagtaggtccagcacgtcatcggggccgaaggtcctcccagatcccccggccgccgagtcccaatgcaggcgcgcggccatggtgctgcacaggcacaacagctcccagacgggggttacgttcagggtggggggcagggccacgagctccagctctccggtgacgttgatcgtggggatgacgcccgtggcgtagtggtcatagatccgccgaaatatggcgctgctgcgggtggccatgggaacgcggagacaggcctccagcaacgccaggtaaataaaccgcgtgcgtcccatcaggctgttgaggttgcgcatgagcgcgacaatttccgccggcgcgacatcggaccggaggtatttttcgacgaaaagacccacctcctccgtctcggcggcctgggccggcagcgacgcctcgggatcccggcaccgcagctcccgtagatcgcgctgggccctgagggcgtcgaaatgtacgccccgcaaaaacagacagaagtcctttggggtcagggtatcgtcgtgtccccagaagcgcacgcgtatgcagtttagggtcagcagcatgtgaaggatgttaaggctgtccgagagacacgccagcgtgcatctctcaaagtagtgtttgtaacggaatttgttgtagatgcgcgacccccgccccagcgacgtgtcgcatgccgacgcgtcacagcgccccttgaaccggcgacacagcaggtttgtgacctgggagaactgcgcgggccactggccgcaggaactgaccacgtgattaaggagcatgggcgtaaagacgggctccgagcgcgccccggagccgtccatgtaaatcagtagctcccccttgcggagggtgcgcacccgtcccagggactggtacacggacaccatgtccggtccgtagttcatgggtttcacgtaggcgaacatgccatcaaagtgcaggggatcgaagctgaggcccacggttacgaccgtcgtgtatataaccacgcggtattggccccacgtggtcacgtccccgaggggggtgagcgagtgaagcaacagcacgcggtccgtaaactgacggcagaaccgggccacgatctccgcgaaggagaccgtcgacgaaaaaatgcagatgttatcgcccccgccaaggcgcgcttccagctccccaaagaacgtggccccccgggcgtccggagaggcgtccggagacgggccgctcggcggcccgggcgggcgcagggcagcctgcaggagctcggtccccagacgcgggagaaacaggcaccggcgcgccgaaaacccgggcatggcgtactcgccgaccaccacatgcacgtttttttcgccccggagaccgcacaggaagtccaccaactgcgcgttggcggttgcgtccatggcgatgatccgaggacaggtgcgcagcaggcgtagcattaacgcatccacgcggcccagttgctgcatcgttggcgaatagagctggcccagcgtcgacataacctcgtccagaacgaggacgtcgtagttgttcagaaggttggggcccacgcgatgaaggctttccacctggacgataagtcggtggaaggggcggtcgttcataatgtaattggtggatgagaagtaggtgacaaagtcgaccaggcctgactcagcgaaccgcgtcgctagggtctgggtaaaactccgacgacaggagacgacgagcacactcgtgtccggagagtggatcgcttcccgcagccagcggatcagcgcggtagtttttcccgaccccattggcgcgcggaccacagtcacgcacctggccgtcggggcgctcgcgttggggaaggtgacgggtccgtgctgctgccgctcgatcgttgttttcgggtgaacccggggcacccattcggccaaatcccccccgtacaacatccgcgctagcgatacgctcgacgtgtactgttcgcactcgtcgtccccaatgggacgcccggcccccagaggatctcccgactccgcgccccccacgaaaggcatgaccggggcgcggacggcgtggtgggtctggtgtgtgcaggtggcgacgtttgtggtctctgcggtctgcgtcacggggctcctcgtcctggcctctgtgttccgggcacggtttccctgcttttacgccacggcgagctcttatgccggggtgaactccacggccgaggtgcgcgggggtgtagccgtgcccctcaggttggacacgcagagccttgtgggcacttatgtaatcacggccgtgttgttgttggccgtggccgtgtatgccgtggtcggcgccgtgacctcccgctacgaccgcgccctggacgcgggccgccgtctggctgcggcccgcatggccatgccgcacgccacgctgatcgccggaaacgtctgctcttggttgctgcagatcaccgtcctgttgctggcccatcgcatcagccagctggcccacctggtttacgtcctgcactttgcgtgtctggtgtattttgcggcccatttttgcaccaggggggtcctgagcgggacgtatctgcgtcaggtgcacggcctgatggagctggccccgacccatcatcgcgtcgtcggcccggctcgcgccgtgctgacaaacgccttgctgttgggcgtcttcctgtgcacggccgacgccgcggtatccctgaataccatcgccgcgttcaactttaatttttcggccccgggcatgctcatctgcctgaccgtgctgttcgccattctcgtcgtatcgctgttgttggtggtcgagggggtgttgtgtcactacgtgcgcgtgttggtgggcccccacctgggggccgtggccgccacgggcatcgtcggcctggcctgcgagcactattacaccaacggctactacgttgtggagacgcagtggccgggggctcagacgggagtccgcgtcgccctcgccctggtcgccgcctttgccctcggcatggccgtgctccgctgcacccgcgcctatctgtatcacaggcggcaccacaccaaattttttatgcgcatgcgcgacacgcgacaccgcgcacattccgccctcaagcgcgtacgcagttccatgcgcggatcgcgagacggccgccacaggcccgcacccggcagcccgcccgggattcccgaatatgcggaagacccctacgcgatctcatacggcggccagctcgaccggtacggagattccgacggggagccgatttacgacgaggtggcggacgaccaaaccgacgtattgtacgccaagatacaacacccgcggcacctgcccgacgacgatcccatctatgacaccgttggggggtacgaccccgagcccgccgaggaccccgtgtacagcaccgtccgccgttggtagctgtttggttccgttttaataaaccgtttgtgtttaacccgaccgtggtgtatgtctggtgtgtggcgtccgatcccgttactatcaccgtccccccccccccctcaaccccggcgattgtgggttttttaaaaacgacacgcgtgcgaccgtatacagaacattgttttggtttttattcgctatcggacatggggggtggaaactgggtggcggggcaggcgcctccgggggtccgccggtgagtgtggcgcgagggggggtccgatgaacgcaggcgctgtctccccggggcccgcgtaaccccgcgcatatccgggggcacgtagaaattaccttcctcttcggactcgatatccacgacgtcaaagtcgtgggcggtcagcgagacgacctccccgtcgtcggtgatgaggacgttgtttcggcagcagcagggccgggccccggagaacgagaggcccatagctcggcgagcgtgtcgtcgaatgccaggcggctgcttcgctggatggccttatagatctccggatcgatgcggacgggggtaatgatcagggcgatcggaacggcctggttcgggagaatggacgccttgctgggtcctgcggccccgagagccccggcgccgtcctccaggcggaacgttacgccctcctccgcgctggtgcggtgcctgccgataaacgtcaccagatgcgggtggggggggcagtcggggaagtggctgtcgagcacgtagccctgcaccaagatctgcttaaagttcgggtgacgggggttcgcgaagacgggctcgcggcggaccagatccccggagctccaggacacgggggagatggtgtggcgtccgaggtcgggggcgccaaacagaagcacctccgagacaacgccgctatttaactccaccaaggcccgatccgcggcggagcaccgccttttttcgcccgaggcgtgggcctctgaccaggcctggtcttgcgtgacgagagcctcctccgggccggggacgcgcccgggcgcgaagtatcgcacgctgggcttcgggatcgaccggataaatgcccggaacgcctccggggaccggtgtgccatcaagtcctcgtacgcggaggccgtggggtcgctggggtccatggggtcgaaagcgtacttggcccggcatttgacctcgtaaaaggccaggggggtcttggggactggggccaggtagccgtgaatgtcccgaggacagacgagaatatccagggacgccccgaccatccccgtgtgaccgtccatgaggaccccacacgtatgcacgttctcttcggcgaggtcgctgggttcgtggaagataaagcgccgcgtgtcggcgccggcctcgccgccgtcgtccgcgcggcccacgcagtagcgaaacagcaggcttcgggccgtcggctcgttcacccgcccgaacatcaccgccgaagactgtacatccggccgcaggctggcgttgtgcttcagccactggggcgagaaacacggaccctgggggccccagcggagggtggatgcggtcgtgaggccccgccggagcagggcccatagctggcagtcggcctggttttgcgtggccgcctcgtaaaaccccatgaggggccggggcgccacggcgtccgcggcggccgggggcccgcggcgcgtcaggcgccataggtgccgaccgagtccgcggtccaccatacccgcctcctcgaggaccacggccagggaacacagataatccaggcgggcccagaggggaccgatggccagaggggcgcggacgccgcgcagcaacccgcgcaggtggcgctcgaacgtctcggctagtatatgggagggcagcgcgttggggatcaccgacgccgaccacatagagtcaaggtccggggagtcgggatcggcgtccgggtcgcgggcgtgggtgcccccaggagatagcggaatgtctggggtcggaggccctgaggcgtcagaaagtgccggcgacgcggcccggggcttttcgtctgcggtgtcggtggcgtgctgatcacgtggggggttaacgggcgaatgggagctcgggtccacagctgacgtcgtctggggtggggggggcaggggacggaaggtggttgtcagcggaagactgttagggcgggggcgcttgggggggctgtcggggccacgaggggtgtcctcggccagggcccagggacgcttagtcacggtgcgtcccggcggacatgctgggcctaccgtggactccatttccgagacgacgtggggggagcggtggttgagcgcgccgccgggtgaacgctgattctcacgacagcgcgtgccgcgcgcacgggttggtgtgacacaggcgggacaccagcaccaggagaggcttaagctcgggaggcagcgccaccgacgacagtatcgccttgtgtgtgtgctggtaatttatacaccgatccgtaaacgcgcgccgaatcttgggattgcggaggtggcgccggatgccctctgggacgtcatacgccaggccgtgggtgttggtctcggccgagttgacaaacagggctgggtgcagcacgcagcgataggcgagcagggccagggcgaagtccggcgacagctggttgttaaaatactggtaaccgggaaaccgggtcacgggtacgcccaggctcggggcgacgtacacgctaaccaccaactccagcagcgtctggcccagggcgtacaggtcaaccgctaacccgacgtcgtgcttcaggcggtggttggtaaattcggcccgttcgttgttaaggtatttcaccaacagctccgggggctggttatacccgtgacccaccagggtgtgaaagttggctgtggttagggcggtgggcatgccaaacatccggggggacttgaggtccggctcctggaggcaaaactgcccccgggcgatcgtggagttggagttgagggtgacgaggctaaagtcggcgaggacggcccgccggagcgagacggcgtccgaccgcagcatgacgaggatgttggcgcacttgatatccaggtggctgatcccgcaggtggtgtttaaaaacacaacggcgcgggccagctccgtgaagcactggtggagggccgtcgagaccgaggggtttgttgtgcgcagggacgccagttggccgatatacttaccgaggtccatgtcgtacgcggggaacactatctgtcgttgttgcagcgagaacccgaggggcgcgatgaagccgcggatgttgtgggtgcggccggcgcgtagaacgcactccccgaccaacagggtcgcgatgagctcaacggcaaaccactccttttcctttatggtcttaacggcaagcttatgttcgcgaatcagttggacgtcaccgtatcccccagaccccccgaagcttcgggccccggggatctcgagggtcgtgtagtgtagggcggggttgatggcgaacacggggctgcatagcttgcggatgcgcgtgagggtgaggatgtgcgagggggacgaggggggtgcggttaacgccgcctgggatctgcgcaggggcgggcggttcagtttggccgccgtaccgggcgtctcgggggacgcgcggcgatgagacgagcggctcattcgccatcgggatagtcccgcgcgaagccgctcgcggaggccggatcggtggcgggacccgtgggaggagcgggagacggcggcgtcctggagagaggggccgctggggcgcccggaggccccgtgggggttggagtgtacgtaggatgcgagccaatccttgaaggaccgttggcgtgcaccttgggggctgaggttagctgccacatgaccagcaggtcgctgtctgcgggactcatccatccttcggccaggtcgccgtctccccacagagaagcgttggtcgctgcttcctcgagttgctcctcctggtccgcaagacgatcgtccacggcgtccaggcgctcaccaagcgccggatcgaggtaccgtcggtgtgcggttagaaagtcacgacgcgccgcttgctcctccacgcgaattttaacacaggtcgcgcgctgtcgcatcatctctaagcgcgcgcgggactttagccgcgcctccaattccaagtgggccgcctttgcagccataaaggcgccaacaaaccgaggatcttgggtgctgacgccctcccggtgcagctgcagggtctggtccttgtaaatctcggctcggaggtgcgtctcggccaggcgtcggcgcagggccgcgtgggcggcatctcggtccattccgccaccctgcgggcgacccggggggtgctctgatagtctcgcgtgcccaaggcccgtgatcggggtacttcgccgccgcgacccgccacccggtgtgcgcgatgtttggtcagcagctggcgtccgacgtccagcagtacctggagcgcctcgagaaacagaggcaacttaaggtgggcgcggacgaggcgtcggcgggcctcaccatgggcggcgatgccctacgagtgccctttttagatttcgcgaccgcgacccccaagcgccaccagaccgtggtccctggcgtcgggacgctccacgactgctgcgagcactcgccgctcttctcggccgtggcgcggcggctgctgtttaatagcctggtgccggcgcaactaaaggggcgtgatttcgggggcgaccacacggccaagctggaattcctggcccccgagttggtacgggcggtggcgcgactgcggtttaaggagtgcgcgccggcggacgtggtgcctcagcgtaacgcctactatagcgttctgaatacgtttcaggccctccaccgctccgaagcctttcgccagctggtgcactttgtgcgggactttgcccagctgctcaaaacctccttccgggcctccagcctcacggagaccacgggcccccccaaaaaacgggccaaggtggacgtggccacccacggccggacgtacggcacgctggagctgttccaaaaaatgatccttatgcacgccacctactttctggccgccgtgctcctcggggaccacgcggagcaggtcaacacgttcctgcgtctcgtgtttgagatccccctgtttagcgacgcggccgtgcgccacttccgccagcgcgccaccgtgtttctcgtcccccggcgccacggcaagacctggtttctggtgcccctcatcgcgctgtcgctggcctcctttcgggggatcaagatcggctacacggcgcacatccgcaaggcgaccgagccggtgtttgaggagatcgacgcctgcctgcggggctggttcggttcggcccgagtggaccacgttaaaggggaaaccatctccttctcgtttccggacgggtcgcgcagtaccatcgtgtttgcctccagccacaacacaaacgtaagtcctcttttctttcgcatggctctcccaaggggccccgggtcgacccgacccacacccacccacccacatacacacacaaccagacgcgggaggaaagtctgccccgtgggcactgatttttattcgggatcgcttgaggaggcccgggcaacggcccgggcaacggtggggcaactcgtagcaaataggcgactgatgtacgaagagaagacacacaggcgccacccggcgctggtcggggggatgttgtccgcgccgcaccgtcccccgacgacctcttgcagacggtccgtgatgcaaggacggcggggggcctgcagcagggtgaccgtatccacgggatggccaaagagaagcggacacaggctagcatccccctggaccgccagggtacactgggccatcttggcccacagacacggggcgacgcagggacaggactccgttacgacggaggagagccacagtgcgttggcggaatcgatgtggggcggcggggcgcaggactcgcagccccccgggtggttggtgatcctggccaggagccatcccagatggcgggccctgcttcccggtggacagagcgaccccaggtcgctgtccatggcccagcagtagatctggccgctggggaggtgccaccaggcccccgggcccaaggcgcagcacgcgcccggctccgggggggtcttcgcggggaccagatacgcgccatccagctcgccgaccactggctcctccgcgagctgttcggtggttgggtcgggggtttcctccgggggggtggccgcccgtatgcgtgcgaacgtgagggtgcacaggagcggggtcagggggtgcgtcacgctccggaggtggacgatcgcgcagtagcggcgctcgcggttaaagaaaaagagggcaaagaaggtgttcgggggcaaccgcagcgccttggggcgcgtcagatacagaaaaatctcgcagaagagggcgcgcccggggtctgggttaggaagggccacctgacacagaggctcggtgaggaccgttagacaccgaaagatcttgagccgctcgtccgcccgaacgacgcgccacacaaagacggagttgacaatgcgcgcgatagagtcgacgtccgtccccaggtcgtcgactctatcgcgcgtgccgcgagctccggcccgggaatccggccggggcaaggtccccgggggaccaggcggcgccaggggccgccggggtcccagctgcgccatgccgggggcggggggagggcaaaccccagaggcgggggccaacggcgcggggaggagtgggtgggcgaggtggccgggggaaggcgcccgctagcgagaccggccgttcccggacgacaccttgcgacaaaacctaaggacagcggcccgcgcgacggggtccgagaggctaaggtaggccgcgatgttaatggtgaacgcaaagccgccgggaaagacaactatgccacagaggcggcgattaaaccccaggcagaggtaggcgtagctttccccgggcaggtattgctcgcagaccctgcgtggggctgtggaggggacggcctccatgaagcgacatttactctgctcgcgtttactgacgtcaccatccatcgccacggcgattggacgattgttaagccgcagcgtgtctccgcttgtgctgtagtagtcaaaaacgtaatggccgtcggagtcggcaaagcgggccgggaggtcgtcgccgagcgggacgacccgccgcccccgaccgccccgtccccccaggtgtgccaggacggccagggcatacgcggtgtgaaaaaaggcgtcgggggcggtcccctcgacggcgcgcatcaggttctcgaggagaatggggaagcgcctggtcacctcccccaaccacgcgcgttggtcggggccaaagtcatagcgcaggcgctgtgagattcgcgggccgccctgaagcgcggcccggatggcctggcccagggcccggaggcacgccagatgtatgcgcgcggtaaaggcgacctcggcggcgatgtcaaagggcggcaggacggggcgcgggtggcgcaggggcacctcgagcgcgggaaagcgtagcagcagctccgcctgcccagcgggagacagctggtgggggcgcacgacgcgttctgcggcgcaggcctcggtcagggccgtggccagcgccgaggacagcagcggagggcgggcgcgtcgcccgccccacgccacggagttctcgtaggagacgacgacgaagcgctgcttggttccgtagtggtggcgcaggaccacggagatagaacgacggctccacagccagtccggccggtcgccgccggccagggcttcccatccgcgatccaaccactcgaccagcgaccgcggctttgcggtaccaggggtaagggttagaacgtcgttcaggatgtcctcgcccccgggcccgtggggcgctggggccacaaagcggcccccgccggggggctccagacccgccagcaccgcatctgcgtcagccgcccccatggcgcccccgctgacggcctggtgaaccagggcgccctggcgtagccccgatgcaacgccacaggccgcacgcccggtccgcgctcggaccgggtggcggcgggtgacgtcctgcactgcccgctgaaccaacgcgaggatctcctcgttctcctgtgcgatggacacgtcctgggccgcggtcgtgtcgccgccgggggccgtcagctgctcctccggggagatgggggggtcggacgccccgacgatgggcgggtctgcgggcgcccccgcgtggggccgggccaagggctgcggacgcggggacgcgctttcccccagacccatggacaggtgggccgcagcctccttcgcggccggcggggcggcggcgccaagcagagcgacgtagcggcacaaatgccgacagacgcgcatgatgcgcgtgctgtcggccgcgtagcgcgtgttgggggggacgagctcgtcgtaactaaacagaatcacgcgggcacagctcgcccccgagccccacgcaaggcgcagcgccgccacggcgtacgggtcatagacgccctgcgcgtcacacaccacgggcagggagacgaacaaccccccggcgctggacgcacgcggaaggaggccagggtgtgccggcacgacgggggccagaagctcccccaccgcatccgcgggcacgtaggcggcaaacgccgtgcaccacggggtacagtcgccggtggcatgagcccgagtctggatttcgacctggaagtttgcggccgtcccgagtccggggcggccgcgcatcagggcggccagagggattcccgcggccgccaggcactcgctggatatgatgacgtgaaccaaagacgagggccgacccgggccgtggccgagatcgtactggacctcgttggccaagtgcgcgttcatggttcgggggtgggtgtgggtgtgtaggcgatgcgggtcccccgagtccgcgggaagggcgtgggtttggcgcgcgtatgcgtattcgccaacggaggcgtgcgtgcttatgcgcggcgcgtttcttctgtctctagggaatccgaggccaggactttaacctgctctttgtcgacgaggccaactttattcgcccggatgcggtccagacgattatgggctttctcaaccaggccaactgcaagattatcttcgtgtcgtccaccaacaccgggaaggccagtacgagctttttgtacaacctccgcggggccgcagacgagcttctcaacgtggtgacctatatatgcgatgatcacatgccgagggtggtgacgcacacaaacgccacggcctgttcttgttatatcctcaacaagcccgttttcatcacgatggacggggcggttcgccggaccgccgatttgtttctggccgattccttcatgcaggagatcatcgggggccaggccagggagaccggcgacgaccggcccgttctgaccaagtctgcgggggagcggtttctgttgtaccgcccctcgaccaccaccaacagcggcctcatggcccccgatttgtacgtgtacgtggatcccgcgttcacggccaacacccgagcctccgggaccggcgtcgctgtcgtcgggcggtaccgcgacgattatatcatcttcgccctggagcacttttttctccgcgcgctcacgggctcggcccccgccgacatcgcccgctgcgtcgtccacagtctgacgcaggtcctggccctgcatcccggggcgtttcgcggcgtccgggtggcggtcgagggaaatagcagccaggactcggccgtcgccatcgccacgcacgtgcacacagagatgcaccgcctactggcctcggagggggccgacgcgggctcgggccccgagcttctcttctaccactgcgagcctcccgggagcgcggtgctgtacccctttttcctgctcaacaaacagaagacgcccgcctttgaacactttattaaaaagtttaactccgggggcgtcatggcctcccaggagatcgtttccgcgacggtgcgcctgcagaccgacccggtcgagtatctgctcgagcagctaaataacctcaccgaaaccgtctcccccaacactgacgtccgtacgtattccggaaaacggaacggcgcctcggatgaccttatggtcgccgtcattatggccatctacctcgcggcccaggccggacctccgcacacattcgctcctatcacacgcgtctcgtgagcgcccaataaacacacccaggtatgctacgcacgaccacggtgtcgtctgttaaggggggggggggaagggggtgttggcgggaagcgtgggaacacgggggattctctcacgaccggcaccagtaccacccccctgtgaacacagaaaccccaacccaaatcccataaacatacgacacacaggcatattttggaatttcttaggtttttatttatttaggtatgctggggtttctccctggatgcccacccccacccccccgtgggtctagccgggccttagggatagcgtataacgggggccatgtctccggaccgcacaacggccgcgccgtcaaaggtgcacacccgaaccacgggagccagggccaaggtgtctcctagttggcccgcgtgggtcagccaggcgacgagcgcctcgtaaagcggcagccttcgctctccatcctgcatcagggccggggcttcggggtgaatgagctgggcggcctcccgcgtgacactctgcatctgcagtagagcgttcacgtacccgtcctgggcacttagcgcaaagagccgggggattagcgtaaggatgatggtggttccctccgtgatcgagtaaaccatgttaaggaccagcgatcgcagctcggcgtttacgggaccgagttgttggacgtccgccagcagcgagaggcgactcccgttgtagtacagcacgttgaggtctggcagccctccggggtttctggggctggggttcaggtcccggatgcccctggccacgagccgcgccacgatttcgcgcgccaggggcgatggaagcggaacgggaaaccgcaacgtgaggtccagcgaatccaggcgcacgtccgtcgcttggccctcgaacacgggcgggacgaggctgatggggtccccgttacagagatctacgggggaggtgttgcgaaggttaacggtgccggcgtgggtgaggcccacgtccagggggcaggcgacgattcgcgtgggaagcacccgggtgatgaccgcggggaagcgccttcggtacgccagcaacaaccccaacgtgtcgggactgacgcctccggagacgaaggattcgtgcgccacgtcggccagcgtcagttgccggcggatggtcggcaggaataccacccgcccttcgcagcgctgcagcgccgccgcatcggggcgcgagatgcccgagggtatcgcgatgtcagtttcaaagccgtccgccagcatggcgccgatccacgcggcagggagtgcagtggtggttcgggtggcgggaggagcgcggtgggggtcagcggcgtagcagagacgggcgaccaacctcgcataggacggggggtgggtcttagggggttgggaggcgacagggaccccagagcatgcgcggggaggtctgtcgggcccagacgcaccgagagcgaatccgtccgcggagtcccggcttgggttttatggggcccggccctcggaatcgcggcttgtcggcggggacaaagggggcggggctaggggcttgcggaaacagaagacgcgtgggataaaagaatcgcactaccccaaggaagggcggggcggtttattacagagccagtcccttgagcggggatgcgtcatagacgagatactgcgcgaagtgggtctcccgcgcgtgggcttccccgttgcgggcactgcggaggagggcggggtcgctggcgcaggtgagcgggtaggcctcctgaaacaggccacacgggtcctccacgagttcgcggcaccccggggggcgcttaaactgtacgtcgctggcggcggtggccgtggacaccgccgaacccgtctccacgatcaggcgctccaggcagcgatgtttggcggcgatgtcggccgacgtaaagaacttaaagcaggggctgagcaccggcgaggccccgttgaggtggtaggccccgttatagagcaggtccccgtacgaaaatcgctgcgacgcccacgggttggccgtggccgcgaaggcccgggacgggtcgctctggccgtggtcgtacatgagggcggtgacatccccctccttgtcccccgcgtaaacgcccccggcggcgcgtccccgggggttgcagggccggcggaagtagttgacgtcggtcgacacgggggtggcgataaactcacacacggcgtcctggccgtggtccatccctgcgcgccgcggcacctgggcgcacccgaacacggggacgggctgggccggccccaggcggtttcccgccacgaccgcgttccgcaggtacacggctgccgcgttgtccaggagagggggagccccgcggcccaggtaaaagttttggggaaggttgcccatgtcggtgacggggttgcggacggttgccgtggccacgacggcggtgtagcccacgcccaggtccacgttcccgcgcggctgggtgagcgtgaagtttacccccccgccagtttcgtgccgggccacctggagctggcccaggaagtacgcctccgacgcgcgctccgagaacagcacgttctcagtcacaaagcggtcctgtcggacgacggtgaacccaaacccgggatggaggcccgtcttgagctgatgatgcaaggccacgggactgatcttgaagtaccccgccatgagcgcgtaggtcagcgcgttctccccggccgcgctctcgcggacgtgctgcacgacgggctgtcggatcgacgaaaagtagttggcccccagagccggggggaccagggggacctgccgcgacaggtcgcgcagggccggggggaaattgggcgcgttcgccacgtggtcggccccggcgaacagcgcgtggacggggagggggtaaaaatagtcgccattttggatggtatggtccagatgctggggggccatcagcaggattccggcgtgcaacgccccgtcgaatatgcgcatgttggtggtggacgcggtgttggcgcccgcgtcgggcgccgccgagcagagcagcgccgttgtgcgttcggccatgttgtgggccagcacctgcagcgtgagcatggcgggcccgtccactaccacgcgcccgttgtgaaacatggcgttgaccgtgttggccaccagattggccgggtgcagggggtgcgcggggtccgtcacggggtcgctggggcactcctcgccgggggcgatctccgggaccaccatgttctgcagggtggcgtatacgcggtcgaagcgaacccccgcggtgcagcagcggccccgcgagaaggcgggcaccatcacgtagtagtaaatcttgtggtgcacggtccagtccgccccccggtgcggccggtcatccgcggcgtccgcggctcgggcctgggtgttgtgcagcagctggccgtcgttgcggttgaagtccgcggtcgccacgttacatgccgccgcgtacacggggtcgtggccccccgcgctaacccggcagtcgcgatggcggtccagggccgcgcgccgcatcagggcgtcacagtcccacacgaggggtggcagcagcgccgggtctcgcattaggtgattcagctcggcttgcgcctgcccgcccagctccgggccggtcagggtaaagtcatcaaccagctgggccagggcctcgacgtgcgccaccaggtcccggtacacggccatgcactcctcgggaaggtctcccccgaggtaggtcacgacgtacgagaccagcgagtagtcgttcacgaacgccgcgcaccgcgtgttgttccagtagctggtgatgcactggaccacgagccgggccagggcgcagaagacgtgctcgctgccgtgtatggcggcctgcagcaggtaaaacaccgccgggtagttgcggtcgtcgaacgccccgcgaacggcggcgatggtggcgggggccatggcgtggcgtcccacccccagctccaggccccgggcgtcccggaacgccgccggacatagcgccaggggcaagttgccgttcaccacgcgccaggtggcctggatctcccccgggccggccgggggaacgtccccccccggcagctccacgtcggccacccccacaaagaagtcgaacgcggggtgcagctcaagagccaggttggcgttgtcgggctgcataaactgctccggggtcatctggccttccgcgacccatcggacccgcccgtgggccaggcgctgcccccaggcgttcaaaaacagctgctgcatgtctgcggcggggccggccggggccgccacgtacgccccgtacggattggcggcttcgacggggtcgcggttaaggcccccgaccgccgcgtcaacgttcatcagcgaagggtggcacacggtcccgatcgcgtgttccagagacaggcgcagcacctggcggtccttcccccaaaaaaacagctggcggggcgggaaggcgcggggatccgggtggccgggggcggggactaggtccccggcgtgcgcggcaaaccgttccatgaccggattgaacaggcccaggggcaggacgaacgtcaggtccatggcgcccaccagggggtagggaacgttggtggcggcgtagatgcgcttctccagggcctccagaaagaccagcttctcgccgatggacaccagatccgcgcgcacgcgcgtcgtctggggggcgctctcgagctcgtccagcgtctgccggttcaggtcgagctgctcctcctgcatctccagcaggtggcggcccacgtcgtccagacttcgcacggccttgcccatcacgagcgccgtgaccaggttggccccgttcaggaccatctcgccgtacgtcaccggcacgtcggcttcggtgtcctccactttcaggaaggactgcaggaggcgctgtttgatcggggcggtggtgacgagcaccccgtcgaccggccgcccgcgcgtgtcggcatgcgtcagacggggcacggccacggagggctgcgtggccgtggtgaggtccacgagccaggcctcgacggcctcccggcggtggcccgccttgcccaggaaaaagctcgtctcgcagaagcttcgctttagctcggcgaccagggtcgcccgggccaccctggtggccaggcggccgttgtccaggtatcgttgcatcggcaacaacaaagccaggggcggcgccttttccagcagcacgtgcagcatctggtcggccgtgccgcgctcaaacgccccgaggacggcctggacgttgcgagcgagctgttggatggcgcgcaactggcgatgcgcgccgatacccgtcccgtccagggcctcccccgtgagcagggcgatggcctcggtggccaggctgaaggcggcgttcagggcccggcggtcgataatcttggtcatgtaattgtgtgtgggttgctcgatggggtgcgggccgtcgcgggcaatcagcggctggtggacctcgaactgtacgcgcccctcgttcatgtaggccagctccggaaacttggtacacacgcacgccaccgacaacccgagctccagaaagcgcacgagcgacagggtgttgcaatacgaccccagcagggcgtcgaactcgacgtcgtacaggctgtttgcatcggagcgcacgcgggaaaaaaaatcaaacaggcgtcgatgcgacgccacctcgatcgtgctaaggagggacccggtcggcaccatggccgcggcataccggtatcccggagggtcgcggttgggagcggccatggggtcgcgtggagatcggctgtctctagcgatattggcccggggaggctaagatccaccccaacgcccggccacccgtgtacgtgcccgacggcccaaggtccaccgaaagacacgacgggcccggacccaaaaaggcgggggatgctgtgtgagaggccgggtgccggtcgggggggaaaggcaccgggagaaggctgcggcctcgttccaggagaacccagtgtccccaacagacccggggacgtgggatcccaggccttatatacccccccccccgccccacccccgttagaacgcgacgggtgcattcaagatggccctggtccaaaagcgtgccaggaagaaattggcagaggcggcaaagctgtccgccgccgccacccacatcgaggccccggccgcgcaggctatccccagggcccgtgtgcgcaggggatcggtgggcggcagcatttggttggtggcgataaagtggaaaagcccgtccggactgaaggtctcgtgggcggcggcgaacaaggcacacagggccgtgcctcccaaaaacacggacatcccccaaaacacgggcgccgacaacggcagacgatccctcttgatgttaacgtacaggaggagcgcccgcaccgcccacgtaacgtagtagccgacgatggcggccaggatacaggccggcgccaccacccttccggtcagcccgtaatacatgcccgctgccaccatctccaacggcttcaggaccaaaaacgaccaaaggaacagaatcacgcgctttgaaaagaccggctgggtatggggcggaagacgcgagtatgccgaactgacaaaaaaatcagaggtgccgtacgaggacaatgaaaactgttcctccagcggcagttctccctcctcccccccgaaggcggcctcgtcgaccagatctcgatccaccagaggaaggtcatcccgcatggtcatggggtgtgcggtggaggtggggagaccgaaaccgcaaagggtcgcttacgtcagcaggatcccgagatcaaagacacccgggttcttgcacaaacaccacccgggttgcatccgcggaggcgagtgttttgataaggccgttccgcgccttgatataacctttgatgttgaccacaaaacccggaatttacgcctacgccccaatgcccacgcaagatgaggtaggtaacccccccgtgggtgtgacgttgcgtttagttcattggaggccaaggggaaaaatggggtggggaggaaacggaaaacccagtaggccgtgtcgggaacacgcccggggttgtcctcaaaaggcagggtccatactacggaagccgtcgttgtattcgagacctgcctgtgcaacgcacgtcggggttgcctgtgtccggttcggcccccaccgcgtgcggcacgcacgaggacgagtccgcgtgctttattggcgttccaagcgttgccctccagtttctgttgtcggtgttcccccatacccacgcccacatccaccgtagggggcctctgggccgtgttacgtcgccgcccgcgatggagcttagctacgccaccaccatgcactaccgggacgttgtgttttacgtcacaacggaccgaaaccgggcctactttgtgtgcggggggtgtgtttattccgtggggcggccgtgtgcctcgcagcccggggagattgccaagtttggtctggtcgttcgagggacaggcccagacgaccgcgtggtcgccaactatgtacgaagcgagctccgacaacgcggcctgcaggacgtgcgtcccattggggaggacgaggtgtttctggacagcgtgtgtcttctaaacccgaacgtgagctccgagctggatgtgattaacacgaacgacgtggaagtgctggacgaatgtctggccgagtactgcacctcgctgcgaaccagcccgggtgtgctaatatccgggctgcgcgtgcgggcgcaggacagaatcatcgagttgtttgaacacccaacgatagtcaacgtttcctcgcactttgtgtataccccgtccccatacgtgttcgccctggcccaggcgcacctcccccggctcccgagctcgctggaggccctggtgagcggcctgtttgacggcatccccgccccacgccagccacttgacgcccacaacccgcgcacggatgtggttatcacgggccgccgcgccccacgacccatcgccgggtcgggggcggggtcggggggcgcgggcgccaagcgggccaccgtcagcgagttcgtgcaagtcaaacacattgaccgcgtgggccccgctggcgtttcgccggcgcctccgccaaacaacaccgactcgagttccctggtgcccggggcccaggattccgccccgcccggccccacgctaagggagctgtggtgggtgttttatgccgcagaccgggcgctggaggagccccgcgccgactctggcctcacccgcgaggaggtacgtgccgtacgtgggttccgggagcaggcgtggaaactgtttggctccgcgggggccccgcgggcgtttatcggggccgcgttgggcctgagccccctccaaaagctagccgtttactactatatcatccaccgagagaggcgcctgtcccccttccccgcgctagtccggctcgtaggccggtacacacagcgccacggcctgtacgtccctcggcccgacgacccagtcttggccgatgccatcaacgggctgtttcgcgacgcgctggcggccggaaccacagccgagcagctcctcatgttcgaccttctccccccaaaggacgtgccggtgggaagcgacgtgcaggccgacagcaccgctctgctgcgctttatagaatcgcaacgtctcgccgtccccgggggggtgatctcccccgagcacgtcgcgtaccttggtgcgttcctgagcgtgctgtacgctggccgcgggcgcatgtccgcagccacgcacaccgcgcggctgacaggggtgacctccctggtgctagcggtgggtgacgtggaccgtctttccgcgtttgaccgcggagcggcgggcgcggccagccgcacgcgggccgccgggtacctggatgtgcttcttaccgttcgtctcgctcgctcccaacacggacagtctgtgtaaaagaccccaataaacgtatatcgctactacacccttgtgtgtcaatggacgcctctccgggggggggggagggaaagcaaagaggggctgggggagcggcaccaccggggcctgaacaaacaaaccacagacacggttacagtttattcggtcgggcggagaaacggccgaagccacgcccactttattcgcgtctccaaaaaaacgggacacttgtccggagaacctttaggatgccagccagggcggcggtaatcataaccacgcccagcgcagaggcggccagaaacccgggcgcaattgcggccacgggctgcgtgtcaaaggctagcaaatgaatgacggttccgtttggaaatagcaacaaggccgtggacggcacgtcgctcgaaaacacgcttggggcgccctccgtcggcccggcggcgatttgctgctgtgtgttgtccgtatccaccagcaacacagacatgacctccccggccggggtgtagcgcataaacacggcccccacgagccccaggtcgcgctggttttgggtgcgcaccagccgcttggactcgatatcccgggtggagccttcgcatgtcgcggtgaggtaggttaggaacagtgggcgtcggacgtcgacgccggtgagcttgtagccgatcccccggggcagaggggagtgggtgacgacgtagctggcgttgtgggtgatgggtaccaggatccgtggctcgacgttggcagactgccccccgcaccgatgtgaggcctcagggacgaaggcgcggatcagggcgttgtagtgtgcccaacgcgtcagggtcgaggcgaggccgtgggtctgctgggccaggacttcgaccggggtctcggatcgggtggcttgagccagcgcgtccaggataaacacgctctcgtctagatcaaagcgcagggaggccgcgcatggcgaaaagtggtccggaagccaaaagagggttttctggtggtcggcccgggccagcgcggtccggaggtcggcgttggtcgctgcggcgacgtcggacgtacacagggccgaggctatcagaaggctccggcgggcgcgttcccgctgcaccgccgaggggacgccagccaagaacggctgccggaggacagccgaggcgtaaaatagcgcccggtggacgaccggggtggtcagcacgcggccccctagaaactcggcatacagggcgtcgatgagatgggctgcgctgggcgccactgcgtcgtacgccgaggggctatccagcacgaaggccagctgatagcccagcgcgtgtaatgccaagctctgttcgcgctccagaatctcggccaccaggtgctggagccgagcctctagctgcaggcgggccgtgggatccaagactgacacattaaaaaacacagaatccgcggcacagcccgcggccccgcgggcggccaacccggcaagcgcgcgcgagtgggccaaaaagcctagcaggtcggagaggcagaccgcgccgtttgcgtgggcggcgttcacgaaagcaaaacccgacgtcgcgagcagccccgttaggcgccagaagagaggggggcgcgggccctgctcggcgcccgcgtcccccgagaaaaactccgcgtatgcccgcgacaggaactgggcgtagttcgtgccctcctccgggtagccgcccacgcggcggagggcgtccagcgcggagccgttgtcggcccgcgtcagggaccctaggacaaagacccgataccgggggccgcccgggggcccgggaagagcccccggggggttttcgtccgcggggtccccgacccgatctagcgtctggcccgcggggaccaccatcacttccaccggagggctgtcgtgcatggatatcacgagccccatgaattcccgcccgtagcgcgcgcgcaccagcgcggcatcgcacccgagcaccagctcccccgtcgtccagatgcccacgggccacgtcgaggccgacggggagaaatacacgtacctacctggggatctcaacaggccccgggtggccaaccaggtcgtggacgcgttgtgcaggtgcgtgatgtccagctccgtcgtcgggtgccgccgggccccaaccggcggtcgggggggcggtgtatcacgcggcccgctcgggtggctcgccgtcgccacgttgtctccccgcgggaacgtcagggcctcggggtcagggacggccgaaaacgttacccaggcccgggaacgcagcaacacggaggcggctggattgtgcaagagacccttaaggggggcgaccgaggggggaggctgggcggtcggctcgaccgtggtgggggcgggcaggctcgcgttcgggggccggccgagcaggtaggtcttcgggatgtaaagcagctggccggggtcccgcggaaactcggccgtggtgaccaatacaaaacaaaagcgctcctcgtaccagcgaagaaggggcagagatgccgtagtcaggtttagttcgtccggcggcgccagaaatccgcgcggtggtttttgggggtcgggggtgtttggcagccacagacgcccggtgttcgtgtcgcgccagtacatgcggtccatgcccaggccatccaaaaaccatgggtctgtctgctcagtccagtcgtggacctgaccccacgcaacgcccaaaataataacccccacgaaccataaaccattccccatgggggaccccgtccctaacccacggggcccgtggctatggcagggcttgccgccccgacgttggctgcgagccctgggccttcacccgaacttgggggttggggtggggaaaaggaagaaacgcgggcgtattggtcccaatggggtctcggtggggtatcgacagagtgccagccctgggaccgaaccccgcgtttatgaacaaacgacccaacacccgtgcgttttattctgtctttttattgccgtcatagcgcgggttccttccggtattgtctccttccgtgtttcagttagcctcccccatctcccgggcaaacgtgcgcgccaggtcgcagatcgtcggtatggagcctggggtggtgacgtgggtctggaccatcccggaggtaagttgcagcagggcgtcccggcagccggcgggcgattggtcgtaatccaggataaagacgtgcatgggacggaggcgtttggccaagacgtccaaagcccaggcaaacacgttatacaggtcgccgttgggggccagcaactcgggggcccgaaacagggtaaataacgtgtccccgatatggggtcgtgggcccgcgttgctctggggctcggcaccctggggcggcacggccgcccccgaaagctgtccccaatcctcccgccacgacccgccgccctgcagataccgcaccgtattggcaagcagcccataaacgcggcgaatcgcggccagcatagccaggtcaagccgctcgccggggcgctggcgtttggccaggcggtcgatgtgtctgtcctccggaagggcccccaacacgatgtttgtgccgggcaaggtcggcgggatgagggccacgaacgccagcacggcctggggggtcatgctgcccataaggtatcgcgcggccgggtagcacaggagggcggcgatgggatggcggtcgaagatgagggtgagggccgggggcggggcatgtgagctcccagcctcccccccgatatgaggagccagaacggcgtcggtcacggcataaggcatgcccattgttatctgggcgcttgtcattaccaccgccgcgtccccggccgatatctcaccctggtcgaggcggtgttgtgtggtgtagatgttcgcgattgtctcggaagcccccaacacccgccagtaagtcatcggctcgggtacgtagacgatatcgtcgcgcgaacccagggccaccagcagttgcgtggtggtggttttccccatcccgtggggaccgtctatataaacccgcagtagcgtgggcattttctgctccaggcggacttccgtggctttttgctgccggcgagggcgcaacgccgtacgtcggttgttatggccgcgagaacgcgcagcctggtcgaacgcagacgcgtgttgatggcaggggtacgaagccatacgcgcttctacaaggcgctggccgaagaggtgcgggagtttcacgccaccaagatctgcggcacgctgttgacgctgttaagcgggtcgctgcagggtcgctcggtattcgaggccacacgcgtcaccttaatatgcgaagtggacctgggaccgcgccgccccgactgcatctgcgtgttcgaattcgccaatgacaagacgctgggcggggtttgtgtcatcatagaactaaagacatgcaaatatatttcttccggggacaccgccagcaaacgcgagcaacgggccacggggatgaagcagctgcgccactccctgaagctcctgcagtccctcgcgcctccgggtgacaagatagtgtacctgtgccccgtcctggtgtttgtcgcccaacggacgctccgcgtcagccgcgtgacccggctcgtcccgcagaaggtctccggtaatatcaccgcagtcgtgcggatgctccagagcctgtccacgtatacggtccccattgagcctaggacccagcgagcccgtcgccgccgcggcggcgccgcccgggggtctgcgagcagaccgaaaaggtcacactctggggcgcgcgacccgcccgagtcagcggcccgccagttaccacccgccgaccaaacccccgcctccacggagggcgggggggtgcttaagaggatcgcggcgctcttctgcgtgcccgtggccaccaagaccaaaccccgagccgcctccgaatgagagtgtttcgttccttccccctccccccgcgtcagacaaaccctaaccaccgcttaagcggcccccgcgaggtccgaagactcatttggatccggcgggagccacccgacaacagcccccgggttttcccacgccagacgccggtccgctgtgccatcgcgccccctcatcccaccccccatcttgtccccaaataaaacaaggtctggtagttaggacaacgaccgcagttctcgtgtgttattttcgctctccgcctctcgcagatggacccgtactgcccatttgacgctctggacgtctgggaacacaggcgcttcatagtcgccgattcccgaaacttcatcacccccgagttcccccgggacttttggatgtcgcccgtctttaacctcccccgggagacggcggcggagcaggtggtcgtcctacaggcccagcgcacagcggctgccgctgccctggagaacgccgccatgcaggcggccgagctccccgtcgatatcgagcgccggttacgcccgatcgaacggaacgtgcacgagatcgcaggcgccctggaggcgctggagacggcggcggccgccgccgaagaggcggatgccgcgcgcggggatgagccggcgggtgggggcgacgggggggcgcccccgggtctggccgtcgcggagatggaggtccagatcgtgcgcaacgacccgccgctacgatacgacaccaacctccccgtggatctgctacacatggtgtacgcgggccgcggggcgaccggctcgtcgggggtggtgttcgggacctggtaccgcactatccaggaccgcaccatcacggactttcccctgaccacccgcagtgccgactttcgggacggccgtatgtccaagaccttcatgacggcgctggtactgtccctgcaggcgtgcggccggctgtatgtgggccagcgccactattccgccttcgagtgcgccgtgttgtgtctctacctgctgtaccgaaacacgcacggggccgccgacgatagcgaccgcgctccggtcacgttcggggatctgctgggccggctgccccgctacctggcgtgcctggccgcggtgatcgggaccgagggcggccggccacagtaccgctaccgcgacgacaagctccccaagacgcagttcgcggccggcgggggccgctacgaacacggagcgctggcgtcgcacatcgtgatcgccacgctgatgcaccacggggtgctcccggcggccccgggggacgtcccccgggacgcgagtacccacgttaaccccgacggcgtggcgcaccacgacgacataaaccgcgccgccgccgcgttcctcagccggggccacaacctattcctgtgggaggaccagactctgctgcgggcaaccgcgaacaccataacggccctgggcgttatccagcggctcctcgcgaacggcaacgtgtacgcggaccgcctcaacaaccgcctgcagctgggcatgctgatccccggagccgtcccttcggaggccatcgcccgtggggcctccgggtccgactcgggggccatcaagagcggagacaacaatctggaggcgctatgtgccaattacgtgcttccgctgtaccgggccgacccggcggtcgagctgacccagctgtttcccggcctggccgccctgtgtcttgacgcccaggcggggcggccggtcgggtcgacgcggcgggtggtggatatgtcatcgggggcccgccaggcggcgctggtgcgcctcaccgccctggaactcatcaaccgcacccgcacaaaccccacccctgtgggggaggttatccacgcccacgacgccctggcgatccaatacgaacaggggcttggcctgctggcgcagcaggcacgcattggcttgggctccaacaccaagcgtttctccgcgttcaacgttagcagcgactacgacatgttgtactttttatgtctggggttcattccacagtacctgtcggcggtttagtgggtggtgggcgaggggggagggggcattagggagaaagaacaagagcctccgttgggttttctttgtgcctgtactcaaaaggtcataccccgtaaacggcgggctccagtcccggcccggcggttggcgtgaacgcaacggcgggagctgggttagcgtttagtttagcattcgctctcgcctttccgcccgccccccgaccgttgcgcctttttttttttcgtccaccaaagtctctgtgggtgcgcgcatggcagccgatgccccgggagaccggatggaggagcccctgcccgacagggccgtgcccatttacgtggctgggtttttggccctgtatgacagcggggactcgggcgagttggcattggatccggatacggtgcgggcggccctgcctccggataacccactcccgattaacgtggaccaccgcgctggctgcgaggtggggcgggtgctggccgtggtcgacgacccccgcgggccgttttttgtggggctgatcgcctgcgtgcagctggagcgcgtcctcgagacggccgccagcgctgcgattttcgagcgccgcgggccgccgctctcccgggaggagcgcctgttgtacctgatcaccaactacctgccctcggtctccctggccacaaaacgcctggggggcgaggcgcaccccgatcgcacgctgttcgcgcacgtcgcgctgtgcgcgatcgggcggcgcctcggcactatcgtcacctacgacaccggtctcgacgccgccatcgcgccctttcgccacctgtcgccggcgtctcgcgagggggcgcggcgactggccgccgaggccgagctcgcgctgtccgggcgcacctgggcgcccggcgtggaggcgctgacccacacgctgctttccaccgccgttaacaacatgatgctgcgggaccgctggagcctggtggccgagcggcggcggcaggccgggatcgccggacacacctacctccaggcgagcgaaaaattcaaaatgtggggggcggagcctgtttccgcgccggcgcgcgggtataagaacggggccccggagtccacggacataccgcccggctcgatcgctgccgcgccgcagggtgaccggtgcccaatcgtccgtcagcgcggggtcgccttgtccccggtactgccccccatgaaccccgttccgacatcgggcaccccggcccccgcgccgcccggcgacgggagctacctgtggatcccggcctcccattacaaccagctcgtcgccggccatgccgcgccccaaccccagccgcattccgcgtttggtttcccggctgcggcggggtccgtggcctatgggcctcacggtgcgggtctttcccagcattaccctccccacgtcgcccatcagtatcccggggtgctgttctcgggacccagcccactcgaggcgcagatagccgcgttggtgggggccatagccgcggaccgccaggcgggcggtcagccggccgcgggagaccctggggtccgggggtcgggaaagcgtcgccggtacgaggcggggccgtcggagtcctactgcgaccaggacgaaccggacgcggactacccgtactaccccggggaggctcgaggcgggccgcgcggggtcgactcccggcgcgcggcccgccattctcccgggaccaacgagaccatcacggcgctgatgggggcggtgacgtctctgcagcaggaactggcgcacatgcgggctcggaccagcgccccctatggaatgtacacgccggtggcgcactatcgccctcaggtgggggagccggaaccaacaacgacccacccggccctttgtcccccggaggccgtgtatcgccccccaccacacagcgccccctacggtcctccccagggtccggcgtcccatgcccccactcccccgtatgccccagctgcctgcccgccaggcccgccaccgcccccatgtccttccacccagacgcgcgcccctctaccgacggagcccgcgttcccccccgccgccaccggatcccaaccggaggcatccaacgcggaggccggggcccttgtcaacgccagcagcgcagcacacgtggacgttgacacggcccgcgccgccgatttgttcgtctctcagatgatgggggcccgctgattcgccccggtctttggtaccatgggatgtcttactgtatatctttttaaataaaccaggtaataccaaataagacccattggtgtatgttctttttttattgggaggcgcgggtaggcgggtagctttacaatgcaaaagccttcgacgtggaggaaggcgtggggggggggggaatcggcactgaccaagggggtccgttttgtcacgggaaaggaaagaggaaacaggccgcggacacccgggggagtttgtgttcccttttctttcttcccacacacacaaaaggcgtaccaaacaaacaaaccaaaagatgcacatgcggtttaacacccgtggtttttatttacaacaaaccccccatcacaggtcgtcctcgtcggcgtcaccgtctttgttgggaacttgggtgtagttggtgttgcggcgcttgcgcatgaccatgtcggtgaccttggcgctgagcagcgcgctcgtgcccttcttcttggccttgtgttccgtgcgctccatggcagacaccagggccatgtaccgtatcatctcccgggcctcggctagcttggcctcgtcaaagtcgccgccctcctcgccctccccggacgcgtccgggttggtggggttcttgagctccttggtggttagcgggtacagggccttcatggggttgctctgcagccgcatgacgtagcgaaaggcgaagaaggccgccgccaggccggccaggaccaacagacccacggccagcgccccaaaggggttggacatgaaggaggacacgcccgacacggccgataccacgccgcccacgatgcccatcaccaccttgccgaccgcgcgccccaggtcgcccatcccctcgaagaacgcgcccaggcccgcaaacatggcggcgttggcgtcggcgtggatgaccgtgtcgatgtcggcgaagcgcaggtcgtgcagctggttgcggcgctggacctccgtgtagtccagcaggccgctgtccttgatctcgtggcgggtgtacacctccagggggacaaactcgtgatcctccagcatggtgatgttgaggtcgatgaaggtgctgacggtggtgatgtcggcgcggctcagctggtgggagtacgcgtactcctcgaagtacacgtagcccccaccgaaggtgaagtagcgccggtgtcccacggtgcacggctcgatcgcatcgcgcgtcagccgcagctcgttgttctcccccagctgcccctcgaccaacgggccctggtcttcgtaccgaaagctgaccagggggcggctgtagcaggccccgggccgcgagctgatgcgcatcgagttttggacgatcacgttgtccgcggcgaccggcacgcacgtggagacggccatcacgtcgccgagcatccgcgcgctcacccgccggcccacggtggccgaggcgatggcgttggggttcagcttgcgggcctcgttccacagggtcagctcgtgattctgcagctcgcaccacgcgatggcaacgcggcccaacatatcgttgacatggcgctgtatgtggttgtacgtaaactgcagcctggcgaactcgatggaggaggtggtcttgatgcgctccacggacgcgttggcgctggccccgggcggcgggggcgtggggtttgggggcttgcggctctgctcgcggaggtgttcccgcacgtacagctccgcgagcgtgttgctgagaaggggctggtacgcgatcagaaagcccccattggccaggtagtactgcggctggcccaccttgatgtgcgtcgcgttgtacctgcgggcgaagatgcggtccatggcgtcgcgggcgtccttgccgatgcagtcccccaggtccacgcgcgagagcgggtactcggtcaggttggtggtgaaggtggtggatatggcgtcggaagagaatcggaaggagccgccgtactcggagcgcagcatctcgtccacctcctgccacttggtcatggtgcagaccgacgggcgctttggcacccagtcccaggccacggtgaacttgggggtcgtgagcaggttccgggtggtcggcgccgtggcccgggccttggtggtgaggtcgcgcgcgtagaagccgtcgacctgcttgaagcggtcggcggcgtagctggtgtgttcggtgtgcgacccctcccggtagccgtaaaacggggacatgtacacaaagtcgccagtcgccaacacaaactcgtcgtacgggtacaccgagcgcgcgtccacctcctcgacgatgcagtttaccgtcgtcccgtaccggtggaacgcctccacccgcgaggggttgtacttgaggtcggtggtgtgccagccccggctcgtgcgggtcgcggcgttggccggtttcagctccatgtcggtctcgtggtcgtcccggtgaaacgcggtggtctccaggttgttgcgcacgtacttggccgtggaccgacagacccccttggcgttgatcttgtcgatcacctcctcgaaggggacgggggcgcggtcctcaaagatccccataaactgggagtagcggtggccgaaccacacctgcgaaacggtgacgtctttgtagtacatggtggccttgaacttgtacggggcgatgttctccttgaagaccaccgcgatgccctccgtgtagttctgaccctcgggccgggtcgggcagcggcgcggctgctcgaactgcaccaccgtggcgcccgtggggggtgggcacacgtaaaagtttgcatcggtgttctccgccttgatgtcccgcaggtgctcgcgcagggtggcgtggcccgcggcgacggtcgcgttgtcgccggcggggcgcggcggctttgggggtttcggttttttgttcttcttcggtttcgggtcccccgttgggggggcgccaggggcgggcggcgccggagtggcagggcccccgttcgccgcctgggtcgcggccgcgaccccaggcgtgccgggggaactcggagccgccgacgccaccaggacccccagcgtcaaccccaagagcgcccatacgacgaaccaccggcgcccccgcgcgggggcgccctggcgcatggcgggactacgggggcccgtcgtgccccccgtcaggtagcctgggggcgaggtgctggaggaccgagtagaggatcgagaaaacgtctcggtcgtagaccacgaccgaccgggggccgatacagccgtcgggggcgctctcgacgatggccaccagcggacagtcggagtcgtacgtgagatatacgccgggcgggtaacggtaacgaccttcggaggtcgggcggctgcagtccgggcggcgcaactcgagctccccgcaccggtagaccgaggcaaagagtgtggtggcgataatcagctcgcgaatatatcgccaggcggcgcgctgagtgggcgttattccggaaatgccgtcaaaacagtaaaacctctgaaattcgctgacggcccaatcagcacccgagccccccgcccccatgatgaaccgggcgagctcctccttcaggtgcggcaggagccccacgttctcgacgctgtaatacagcgcggtgttggggggctgggcgaagctgtgggtggagtgatcaaagaggggcccgttgacgagctcgaagaagcgatgggtgatgctggggagcagggccgggtccacctggtgtcgcaggagagacgctcgcatgaaccggtgcgcgtcgaacacgcccggcgccgagcggttgtcgatgaccgtgcccgcgcccgccgtcagggcgcagaagcgcgcgcgcgccgcaaagccgttggcgaccgcggcgaacgtcgcgggcagcacctcgccgtggacgctgacccgcagcatcttctcgagctccccgcgctgctcgcggacgcagcgccccaggctggccaacgaccgcttcgtcaggcggtccgcgtacagccgccgtcgctcccgcacgtccgcggccgcttgcgtggcgatgtccccccacgtctcgggcccctgccccccgggcccgcggcgacggtcttcgtcctcgcccccgcccccgggagctcccaacccccgtgccccttcctctacggcgacacggtccccgtcgtcgtcggggcccgcgccgcccttgggcgcgtccgccgcgccccccgcccccatgcgcgccagcacgcgacgcagcgcctcctcgtcgcactgttcggggctgacgaggcgccgcaagagcggcgtcgtcaggtggtggtcgtagcacgcgcggatgagcgcctcgatctgatcgtcgggtgacgtggcctgaccgccgattattagggcgtccaccatatccagcgccgccaggtggctcccgaacgcgcgatcgaaatgctccgcccgccgcccgaacagcgccagttccacggccaccgcggcggtctcctgctgcaactcgcgccgcgccagcgcggtcaggttgctggcaaacgcgtccatggtggtctggccggcgcggtcgccggacgcgagccagaatcgcaattcgctgatggcgtacaggccgggcgtggtggcctgaaacacgtcgtgcgcctccagcagggcgtcggcctccttgcggaccgagtcgttctcgggcgacgggtggggctgcccgtcgccccccgcggtccgggccagcgcatggtccaacacggagagcgcccgcgcgcggtcggcgtccgacagcccggcggcgtggggcaggtaccgccgcagctcgttggcgtccagccgcacctgcgcctgctgggtgacgtggttacagatacggtccgccaggcggcgggcgatcgtcgccccctggttcgccgtcacacacagttcctcgaaacagaccgcgcaggggtgggacgggtcgctaagctccggggggacgataaggcccgaccccaccgcccccaccataaactcccgaacgcgctccagcgcggcggtggcgccgcgcgagggggtgatgaggtggcagtagtttagctgctttagaaagttctcgacgtcgtgcaggaaacacagctccatatggacggtcccgccatacgtatccagcctgacccgttggtgatacggacagggtcgggccaggcccatggtctccgtgaaaaacgccgcgacgtctcccgcggtcgcgaacgtctccaggctgcccaggagccgctcgccctcgcgccacgcgtactctagcagcaactccagggtgaccgacagcggggtgagaaaggccccggcctgggcctccaggcccggcctcagacgacgccgcagcgcccgcacctgaagcgcgttcagcttcagttgggggagcttcccccgtccgatgtgggggtcgcaccgccggagcagctctatctgaaacacataggtctgcacctgcccgagcagggctaacaacttttgacgggccacggtgggctcggacaccggggcggccatctcgcggcgccgatctgtaccgcggccggagtatgcggtggaccgaggcggtccgtacgctacccggcgtctggctgagccccggggtccccctcttcggggcggcctcccgcgggcccgccgaccggcaagccgggagtcggcggcgcgtgcgtttctgctctattcccagacaccgcggagaggaatcacggcccgcccagagatatagacacggaacacaaacaagcacggatgtcgtagcaataatttattttacacacattccccgccccgccctaggttcccccaccccccaacccctcacagcatatccaacgtcaggtctccctttttgtcggggggcccctccccaaacgggtcatccccgtggaacgcccgtttgcggccggcaaatgccggtcccggggcccccgggccgccgaacggcgtcgcgttgtcgtcctcgcagccaaaatccccaaagttaaacacctccccggcgttgccgagttggctgactagggcctcggcctcgtgcgccacctccagggccgcgtccgtcgaccactcgccgttgccgcgctccagggcacgcgcggtcagctccatcatctcctcgcttaggtactcgtcctccaggagcgccagccagtcctcgatctgcagctgctgggtgcggggccccaggcttttcacggtcgccacgaacacgctactggcgacggccgccccgccctcggagataatgccccggagctgctcgcacagcgagctttcgtgcgctccgccgccgaggcttgaggccgcgcacacaaacccggcccggggacaggccaggacgaacttgcgggtgcggtcaaaaataaggagcgggcacgcgtttttgccgcccatcaggctggcccagttcccggcctgaaacacacggtcgttgccggccatgccgtagtacttgctgatgctcaaccccaacacgaccatggggcgcgccgccatgacgggccgcagcaggttgcagctggcgaacatggacgtccacgcgcccggatgcgcgtccacggcgtccatcagcgcgcgggccccggcctccaggcccgccccgccctgcgcggaccacgcggccgcagcctgcacgctggggggacggcgggaccccgcgatgatggccgtaagggtgttgatgaagtatgtcgagtgatcgcagtaccgcagaatctggtttgccatgtagtacatcgccagctcgctcacgttgttgggggccaggttaataaagtttatcgcgccgtagtccagggaaaactttttaatgaacgcgatggtctcgatgtcctcgcgcgacaggagccgggcgggaagctggttgcgttggagggccgtccagaaccactgcgggttcggctggttggaccccgggggcttgccgttggggaagatggccgcgtggaactgcttcagcagaaagcccagcggtccgaggaggatgtccacgcgcttgtcgggcttctggtaggcgctctggaggctggcgacccgcgccttggcggcctcggacgcgttggcgctcgcgcccgcgaacaacacgcggctcttgacgcgcagctccttgggaaaccccagggtcacgcgggcaacgtcgccctcgaagctgctctcggcgggggccgtctggccggccgttaggctgggggcgcagatagccgccccctccgagagcgcgaccgtcagcgttttggccgacagaaacccgttgttaaacatgtccatcacgcgccgccgcagcaccggttggaattgattgcgaaagttgcgcccctcgaccgactgcccggcgaacaccccgtggcactgactcagggccaggtcctggtacacggcgaggttggatcgccgcccgagaagctgaagcagggggcacggcccgcacgcgtacgggtccagcgtcagggacatggcgtggttggcctcgcccagaccgtcgcgaaacttgaagttcctcccctccaccaggttgcgcatcagctgctccacctcgcggtccacgacctgcctgacgttgttcaccaccgtatgcagggcctcgcggttggtgatgatggtctccagccgccccatggccgtggggaccgcctggtccacgtactgcagggtctcgagttcggccatgacgcgctcggtcgccgcgcggtacgtctcctgcatgatggtccgggcggtctcggatccgtccgcgcgcttcagggccgagaaggcggcgtagtttcccagcacgtcgcagtcgctgtacatgctgttcatggtcccgaagacgccgatggctccgcgggcggcgctggcgaactttggatggcgcgcccggaggcgcatgagcgtcgtgtgtacgcaggcgtggcgcgtgtcgaaggtgcataggttacagggcacgtcggtctggttggagtccgcgacgtatcgaaacacgtccatctcctggcgcccgacgatcacgccgccgtcgcagcgctccaggtaaaacagcatcttggccagcagcgccggggaaaacccacacagcatggccaggtgctcgccggcaaattcctgggttccgccgacgaggggcgcggtgggccgaccctcgaacccgggcaccacgtgtccctcgcggtccacctgtgggttggccgccacgtgggtcccgggcacgaggaagaagcggtaaaaggagggtttgctgtggtcctttgggtccgccgggccggcgtcgtccacctcggtgagatggagggccgagttggtgctaaataccatggcccccacgagtcccgcggcgcgcgccaggtacgccccgacggcgttggcgcgggccgcggccgtgtcctggccctcgaacagcggccacgcggagatgtcggtgggcggctcgtcaaagacggccatcgacacgatagactcgagggccagggcggcgtctccggccatgacggaggccaggcgctgttcgaacccgcccgccgggcccttgccgccgccgtcgcgcccgccccgcggggtcttaccctggctggcttcgaaggccgtgaacgtaatgtcggcggggagggcggcgccctcgtggttttcgtcaaacgccaggtgggcggccgcgcgggccacggcgtccacgtttcggcatcgcagtgccacggcggcgggtcccacgaccgcctcgaacaggaggcggttgagggggcggttaaaaaacggaagcgggtaggtaaaattctccccgatcgatcggtggttggcgttgaacggctctgcgatgacacggctaaaatccggcatgaacagctgcaacgggtacacgggtatgcggtgcacctccgccccgcctatggttaccttgtccgagcctcccaggtgcagaaaggtgttgttgatgcacacggcctccttgaagccctcggtaacgaccagatacaggagggcgcggtccgggtccaggccgaggcgctcacacagcgcctcccccgtcgtctcgtgtttgaggtcgccgggccggggggtgtagtccgaaaagccaaaatggcggcgtgcccgctcgcaaagtcgcgtcaggttcggggcctgggtgctggggtccaggtgccggccgccgtgaaagacgtacacggacgagctgtagtgcgagggcgtcagtttcagggacaccgcggtacccccgagccccgtcgtgcgagaacccacgaccacggccacgttggcctcaaagccgctctccacggtcaggcccacgaccaggggcgccacggcgacgtcggaatcgccgctgcgtgccgacagtaacgccagaagctcgatgccttcggacggacacgcgcgagcgtacacgtatcccaggggcccgggggggaccttgatggtggttgccgtcttgggctttgtctccatgtccttttgtcaatcggtccgcgaacggaggtaatcccggcacgacgacggacgcccgacaaggtatgtctcccgagcgtcaaaatccgggggggggcggcgacggtcaaggggagggttggagaccggggttggggaatgaatccctccccttcaccgacaaccccccgggtaaccacggggtgccgatgaaccccggcggccggcaacgcggggtccctgcgagaggcacagatgcttacggtcaggtgctccgggtcgggtgcgtctggtatgcggttggtatatgtacactttacctgggggcgtgccggtccgccccagcccctcccacgccccgcgcgtcatcagccggtgggcgtggccgctattataaaaaaagtgagaacgcgaagcgttcgcactttgtcctaataatatatatattattaggacaaagtgcgaacgcttcgcgttctcactttttttataatagcggccacgcccaccggctacgtcactctcctgtcggccgccggcggtccataagcccggccggccgggccgacgcgaataaaccgggccgccggccggggcgccgcgcagcagctcgccgcccggatccgccagacaaacaaggcccttgcacatgccggcccgggcgagcctgggggtccggtaattttgccatcccacccaagcggctttttgggtttttctcttcccccctccccacattcccctctttaggggttcgggtgggaacaaccgcgatgttttccggtggcggcggcccgctgtcccccggaggaaagtcggcggccagggcggcgtccgggttttttgcgcccgccggccctcgcggagccagccggggacccccgccttgtttgaggcaaaacttttacaacccctacctcgccccagtcgggacgcaacagaagccgaccgggccaacccagcgccatacgtactatagcgaatgcgatgaatttcgattcatcgccccgcgggtgctggacgaggatgcccccccggagaagcgcgccggggtgcacgacggtcacctcaagcgcgcccccaaggtgtactgcgggggggacgagcgcgacgtcctccgcgtcgggtcgggcggcttctggccgcggcgctcgcgcctgtggggcggcgtggaccacgccccggcggggttcaaccccaccgtcaccgtctttcacgtgtacgacatcctggagaacgtggagcacgcgtacggcatgcgcgcggcccagttccacgcgcggtttatggacgccatcacaccgacggggaccgtcatcacgctcctgggcctgactccggaaggccaccgggtggccgttcacgtttacggcacgcggcagtacttttacatgaacaaggaggaggtcgacaggcacctacaatgccgcgccccacgagatctctgcgagcgcatggccgcggccctgcgcgagtccccgggcgcgtcgttccgcggcatctccgcggaccacttcgaggcggaggtggtggagcgcaccgacgtgtactactacgagacgcgccccgctctgttttaccgcgtctacgtccgaagcgggcgcgtgctgtcgtacctgtgcgacaacttctgcccggccatcaagaagtacgagggtggggtcgacgccaccacccggttcatcctggacaaccccgggttcgtcaccttcggctggtaccgtctcaaaccgggccggaacaacacgctagcccagccgcgggccccgatggccttcgggacatccagcgacgtcgagtttaactgtacggcggacaacctggccatcgaggggggcatgagcgacctaccggcatacaagctcatgtgcttcgatatcgaatgcaaggcggggggggaggacgagctggcctttccggtggccgggcacccggaggacctggtcatccagatatcctgtctgctctacgacctgtccaccaccgccctggagcacgtcctcctgttttcgctcggttcctgcgacctccccgaatcccacctgaacgagctggcggccaggggcctgcccacgcccgtggttctggaattcgacagcgaattcgagatgctgttggccttcatgacccttgtgaaacagtacggccccgagttcgtgaccgggtacaacatcatcaacttcgactggcccttcttgctggccaagctgacggacatttacaaggtccccctggacgggtacggccgcatgaacggccggggcgtgtttcgcgtgtgggacataggccagagccacttccagaagcgcagcaagataaaggtgaacggcatggtgaacatcgacatgtacgggattataaccgacaagatcaagctctcgagctacaagctcaacgccgtggccgaagccgtcctgaaggacaagaagaaggacctgagctatcgcgacatccccgcctactacgccgccgggcccgcgcaacgcggggtgatcggcgagtactgcatacaggattccctgctggtgggccagctgttttttaagtttttgccccatctggagctctcggccgtcgcgcgcttggcgggtattaacatcacccgcaccatctacgacggccagcagatccgcgtctttacgtgcctgctgcgcctggccgaccagaagggctttattctgccggacacccaggggcgatttaggggcgccgggggggaggcgcccaagcgtccggccgcagcccgggaggacgaggagcggccagaggaggagggggaggacgaggacgaacgcgaggagggcgggggcgagcgggagccggagggcgcgcgggagaccgccggcaggcacgtggggtaccagggggccagggtccttgaccccacttccgggtttcacgtgaaccccgtggtggtgttcgactttgccagcctgtaccccagcatcatccaggcccacaacctgtgcttcagcacgctctccctgagggccgacgcagtggcgcacctggaggcgggcaaggactacctggagatcgaggtgggggggcgacggctgttcttcgtcaaggctcacgtgcgagagagcctcctcagcatcctcctgcgggactggctcgccatgcgaaagcagatccgctcgcggattccccagagcagccccgaggaggccgtgctcctggacaagcagcaggccgccatcaaggtcgtgtgtaactcggtgtacgggttcacgggagtgcagcacggactcctgccgtgcctgcacgttgccgcgacggtgacgaccatcggccgcgagatgctgctcgcgacccgcgagtacgtccacgcgcgctgggcggccttcgaacagctcctggccgatttcccggaggcggccgacatgcgcgcccccgggccctattccatgcgcatcatctacggggacacggactccatctttgtgctgtgccgcggcctcacggccgccgggctgacggccgtgggcgacaagatggcgagccacatctcgcgcgcgctgtttctgccccccatcaaactcgagtgcgaaaagacgttcaccaagctgctgctgatcgccaagaaaaagtacatcggcgtcatctacgggggtaagatgctcatcaagggcgtggatctggtgcgcaaaaacaactgcgcgtttatcaaccgcacctccagggccctggtcgacctgctgttttacgacgataccgtctccggagcggccgccgcgttagccgagcgccccgcggaggagtggctggcgcgacccctgcccgagggactgcaggcgttcggggccgtcctcgtagacgcccatcggcgcatcaccgacccggagagggacatccaggactttgtcctcaccgccgaactgagcagacacccgcgcgcgtacaccaacaagcgcctggcccacctgacggtgtattacaagctcatggcccgccgcgcgcaggtcccgtccatcaaggaccggatcccgtacgtgatcgtggcccagacccgcgaggtagaggagacggtcgcgcggctggccgccctccgcgagctagacgccgccgccccaggggacgagcccgccccccccgcggccctgccctccccggccaagcgcccccgggagacgccgtcgcctgccgaccccccgggaggcgcgtccaagccccgcaagctgctggtgtccgagctggccgaggatcccgcatacgccattgcccacggcgtcgccctgaacacggactattacttctcccacctgttgggggcggcgtgcgtgacattcaaggccctgtttgggaataacgccaagatcaccgagagtctgttaaaaaggtttattcccgaagtgtggcaccccccggacgacgtggccgcgcggctccggaccgcagggttcggggcggtgggtgccggcgctacggcggaggaaactcgtcgaatgttgcatagagcctttgatactctagcatgagccccccgtcgaagctgatgtccctcattttacaataaatgtctgcggccgacacggtcggaatctccgcgtccgtgggtttctctgcgttgcgccggaccacgagcacaaacgtgctctgccacacgtgggcgacgaaccggtaccccgggcacgcggtgagcatccggtctatgagccggtagtgcaggtgggcggacgtgccgggaaagatgacgtacagcatgtggcccccgtaagtggggtccgggtaaaacaacagccgcgggtcgcacgccccgcctccgcgcaggatcgtgtggacgaaaaaaagctcgggttggccaagaatcccggccaagaggtcctggaggggggcgttgtggcggtcggccaacacgaccaaggaggccaggaaggcgcgatgctcgaatatcgtgttgatctgctgcacgaaggccaggattagggcctcgcggctggtggcggcgaaccgcccgtctcccgcgttgcacgcgggacagcaacccccgatgcctaggtagtagcccatcccggagagggtcaggcagttgtcggccacggtctggtccagacagaagggcagcgagacgggagtggtcttcaccaggggcaccgagagcgagcgcacgatggcgatctcctcggagggcgtctgggcgagggcggcgaaaaggccccgatagcgctggcgctcgtgtaaacacagctcctgtttgcgggcgtgaggcggcaggctcttccgggaggcccgacgcaccacgcccagagtcccgccggccgcagaggagcgcgaccgccggcgctccttgccgtgatagggcccgggccgggagccgcggcgatgggggtcggtgtcatacataggtacacagggtgtgctccagggacaggagcgagatcgagtggcgtctaagcagcgcgcccgcctcacggacaaatgtggcgagcgcggtgggctttggtacaaatacctgatacgtcttgaaggtgtagatgagggcacgcaacgctatgcagacacgcccctcgaactcgttcccgcaggccagcttggccttgtggagcagcagctcgtcgggatgggtggcggggggatggccgaacagaacccaggggtcaacctccatctccgtaatggcgcacatggggtcacagaacatgtgcttaaagatggcctcgggccccgcggcccgaagcaggctcacaaaccggcccccgtccccgggctgcgtctcggggtcagcctcgagctggtcgacgacgggtacgatacagtcgaagaggctcgtgttgttttccgagtagcggaccacggaggcccggagtctgcgcagggccagccagtaagcacgcaccagtaacaggttacacagcaggcattctccgccggtgcgcccgcgcccccggccgtgtttcagcacggtggccatcagagggcccaggtcgaggtcgggctgggcatcgggttcggtaaactgcgcaaagcgcggagccacgtcgcgcgtgcgtgccccgcgatgcgcttcccaggactggcggaccgtggcgcgacgggcctccgcggcagcgcgcagctggggccccgactcccagacggcgggggtgccggcgaggagcaacaggaccagatccgcgtacgcccacgtatccggcgactcctccggctcgcggtccccggcgaccgtctcgaattccccgttgcgagcggcggcgcgagtacagcagctgtccccgcccccgcgccgaccctccgtgcagtccaggagacgggcgcaatccttccagttcatcagcgcggtggtgagcgacggctgcgtgccggatcccgccgccgaccccgccccctcctcgcccccggaggccaaggttccgatgagggcccgggtggcagactgcgccaggaacgagtagttggagtactgcaccttggcggctcccggggagggcgagggcttgggttgcttctgggcatgccgcccgggcaccccgccgtcggtacggaagcagcagtggagaaaaaagtgccggtggatgtcgtttatggtgagggcaaagcgtgcgaaggagccgaccagggtcgccttcttggtgcgcagaaagtggcggtccatgacgtacacaaactcgaacgcggccacgaagatgctagcggcgcagtggggcgcccccaggcatttggcacagagaaacgcgtaatcggccacccactgaggcgagaggcggtaggtttgcttgtacagctcgatggtgcggcagaccagacagggccggtccagcgcgaaggtgtcgatggccgccgcggaaaagggcccggtgtccaaaagcccctccccacagggatccgggggcgggttgcggggtcctccgcgcccgcccgaaccccctccgtcgcccgcccccccgcgggcccttgagggggcggtgaccacgtcggcggcgacgtcctcgtcgagcgtaccgacgggcggcacacctatcacgtgactggccgtcaggagctcggcgcagagagcctcgttaagagccaggaggctgggatcgaaggccacatacgcgcgctcgaacgcccccgccttccagctgctgccgggggactcttcgcacaccgcgacgctcgccaggaccccggggggcgaagttgccatggctgggcgggaggggcgcacgcgccagcgaactttacgggacacaatccccgactgcgcgctgcggtcccagaccctggagagtctagacgcgcgctacgtctcgcgagacggcgcgcatgacgcggccgtctggttcgaggatatgacccccgccgagctggaggttgtcttcccgactacggacgccaagctgaactacctgtcgcggacgcagcggctggcctccctcctgacgtacgccgggcctataaaagcgcccgacgacgccgccgccccgcagaccccggacaccgcgtgtgtgcacggcgagctgctcgcccgcaagcgggaaagattcgcggcggtcattaaccggttcctggacctgcaccagattctgcggggctgacgcgcgtgctgttgggcgggacggttcgcgaaccctttggtgggtttacgcgggcacgcacgctcccatcgcgggcgccatggcgggactgggcaagccctacaccggccacccaggtgacgccttcgagggtctcgttcagcgaattcggcttatcgtcccatctacgttgcggggcggggacggggaggcgggcccctactctccctccagcctcccctccaggtgcgcctttcagtttcatggccatgacgggtccgacgagtcgtttcccatcgagtatgtactgcggcttatgaacgactgggccgaggtcccgtgcaacccttacctgcgcatacagaacaccggcgtgtcggtgctgtttcaggggttttttcatcgcccacacaacgcccccgggggcgcgattacgccagagcggaccaatgtgatcctgggctccaccgagacgacggggctgtccctcggcgacctggacaccatcaaggggcggctcggcctggatgcccggccgatgatggccagcatgtggatcagctgctttgtgcgcatgccccgcgtgcagctcgcgtttcggttcatgggccccgaagatgccggacggacgagacggatcctgtgccgcgccgccgagcaggctattacccgtcgccgccgaacccggcggtcccgggaggcgtacggggccgaggccgggctgggggtggccggaacgggtttccgggccaggggggacggttttggcccgctccccttgttaacccaagggccctcccgcccgtggcaccaggccctgcggggtcttaagcacctacggattggcccccccgcgctcgttttggcggcgggactcgtcctgggggccgctatttggtgggtggttggtgctggcgcgcgcctataaaaaaggacgcaccgccgccctaatcgccagtgcgttccggacgccttcgccccacacagccctcccgaccgacacccccatatcgcttcccgacctccggtcccgatggccgtcccgcaatttcaccgccccagcaccgttaccaccgatagcgtccgggcgcttggcatgcgcgggctcgtcttggccaccaataactctcagtttatcatggataacaaccacccgcacccccagggcacccaaggggccgtgcgggagtttctccgcggtcaggcggcggcgctgacggaccttggtctggcccacgcaaacaacacgtttaccccgcagcctatgttcgcgggcgacgccccggccgcctggttgcggcccgcgtttggcctgcggcgcacctattcaccgtttgtcgttcgagaaccttcgacgcccgggaccccgtgaggcccggggagttccttctggggtgttttaatcaataaaagaccacaccaacgcacgagccttgcgtttaatgtcgtgtttattcaagggagtgggatagggttcgacggttcgaaacttaacacaccaaataatcgagcgcgtctagcccagtaacatgcgcacgtgatgtaggctggtcagcacggcgtcgctgtgatgaagcagcgcccggcgggtccgctgtaactgctgttgtaggcggtaacaggcgcggatcagtaccgccagggcgctacgaccggtgcgttgcacgtagcgtcgcgacagaactgcgtttgccgatacgggcggggggccgaattgtaagcgcgtcacctcttgggagtcatcggcggataacgcactgaatggttcgttggttatgggggagtgtggttccccagggagtgggtcgagcgcctcggcctcggaatccgagaggaacaacgaggtggcgtcggagtcttcgtcgtcagagacatacagggtctgaagcagcgacacgggcgggggggtagcgtcgatgtgtagcgcgagggaggatgcccacgaagacaccccagacaaggagctgcccgtgcgtggatttgtggaagacgcggaagccgggacggatgggcggttttgcggtgcccggaaccgaaccgccggatactccccgggtgctacatgcccgttttggggctggggttggggctggggttggggctggggttggggctggggttggggctggggttggggctggggttggggttggggttggggctggggttggggttggggctggggctggggctggggctggggctggggctggggctggggctggggctggggctggggctggggctggggctggggctggggctggggctggggttggggcgcggacaggcggctgacggtcaaatgcccccgggggcgcgcagatgtggtgggcgtggccaccggctgccgtgtagtggggcggcgggaaaccgggcctccgggcgcaacaccgccctccagcgtcaagtatgtggggggcgggcctgacgtcgggggcggggcgacgggttggaccgcgggaggcgggggagagggacctgcgggagaggatgaggtcggctcggccgggttgcggcctaaaacaggggccgtggggtcggcggggtcccagggtgaagggagggattcccgcgattcggacagcgacgcgacagcggggcgcgtaaggcgccgctgcggcccgcctacgggaaccctggggggggttggcgcgggacccgaggttagcggggggcggcggttttcgcccccgggcaaaaccgtgccggttgcgaccgggggcggaacgggatcgatagggagagcgggagaagcctggccggcggcctggggcccgagcgggaggggcacaccagacaccaaagcgtggggcgctggctctgggggtttgggaggggccggggggcgcgcgaaatcggtaaccggggcgaccgtgtcggggagggcaggcggccgccaaccctgggtggtcgcggaagcctgggtggcgcgcgccagggagcgtgcccggcggtgtcggcgcgcgcgcgacccggacgaagaagcggcagaagcgcgggaggaggcgggggggcggggggcggtggcatcggggggcgccggggaactttggggggacggcaagcgccggaagtcgtcgcgggggcccacgggcgccggccgcgtgctttcggccgggacgcccggtcgtgcttcgcgagccgtgactgccggcccagggggccgcggtgcacactgggacgtggggacggactgatcggcggtgggcgaaagggggtccggggcaaggaggggcgcggggccgccggagtcgtcagacgcgagctcctccaggccgtgaatccatgcccacatgcgaggggggacgggctcgccgggggtggcgtcggtgaatagcgtgggggccaggcttccgggccccaacgagccctccgccccaacaaggtccacagggccgggggtcgggttcgggaccgaggggctctggtcgtcgggggcgcgctggtacaccggatgccccgggaatagctcccccgacaggagggaggcgtcgaacggccgcccgaggatagctcgcgcgaggaaggggtcctcgtcggtggcgctggcggcgaggacgtcctcgccgcccgccacaaacgggagctcctcggtggcctcgctgccaacaaaccgcacgtcgggggggccgggggggtccgggttttcccacaacaccgcgaccggggtcatggagatgtccacgagcaccagacacggcgggccccgggcgaggggccgctcggcgatgagcgcggacaggcgcgggagctgtgccgccagacacgcgttttcgatcgggttcaggtcggcgtgcaggaggcggacggcccacgtctcgatgtcggacgacacggcatcgcgcaaggcggcgtccggcccgcgagcgcgtgagtcaaacagcgtgagacacagctccagctccgactcgcgggaaaaggccgtggtgttgcggagcgccacgacgacgggcgcgcccaggagcactgccgccagcaccaggtccatggccgtaacgcgcgccgcgggggtgcggtgggtggcggcggccggcacggcgacgtgctggcccgtgggccggtagagggcgttggggggagcggggggtgacgcctcgcgcccccccgaggggctcagcgtctgcccagattccagacgcgcggtcagaagggcgtcgaaactgtcatactctgtgtagtcgtccggaaacatgcaggtccaaagagcgaccagagcggtgcttgggagacacatgcgcccgaggacgctcaccgccgccagcgcctgggcgggactcagctttcccagcgcggcgccgcgctcggttcccagctcggggaccgagcgccagggcgccagggggtcggtttcggacaacttgccgcggcgccagtctgccagccgcgtgccgaacatgaggccccgggtcggagggcctccggccgaaaacgctggcagcacgcggatgcgggcgtctggatgcggggtcaggcgctgcacgaatagcatggaatctgctgcgttctgaaacgcacgggggagggtgagatgcatgtactcgtgttggcgaaccagatccaggcgccaaaaggtgtaaatgtgttccggggagctggccaccagcgccaccagcacgtcgttctcgttaaaggaaacgcggtgcctagtggagctctggggtccgagcggcggccccggggccgccgcgtcacccccccattccagctgggcccagcgacacccaaactcgcgcgtgagagtggtcgcgacgagggcgacgtagagctcggccgccgcatccatcgaggccccccatctcgcctggcggtggcgcacaaagcgtccgaagagctgaaagttggcggcctgggcgtcgctgagggccagctgaagccggttgatgacggtgaggacgtacatggccgtgacggtcgaggccgactccagggtgtccgtcggaagcggggggcgaatgcatgccgcctcgggacacatcagcagcgcgccgagcttgtcggtcacggccgggaagcagagcgcgtactgcagtggcgttccatccgggaccaaaaagctgggggcgaacggccgatccagcgtactggtggcctcgcgcagcaccaggggccccgggcctccgctcactcgcaggtacgcctcgccccggcggcgcagcatctgcgggtcggcctcttggccgggtggggcggacgcccgggcgcgggcgtctagggcgcgaagatccacgagcaggggcgcgggcgcggccgccgcgcccgcgcccgtctggcctgtggccttggcgtacgcgctatataagcccatgcggcgttggatgagctcccgcgcgccccggaactcctccaccgcccatggggccaggtccccggccaccgcgtcgaattccgccaacaggccccccagggtgtcaaagttcatctcccaggccacccttggcaccacctcgtcccgcagccgggcgctcaggtcggcgtgttgggccacgcgccccccgagctcctccacggccccggcccgctcggcgctcttggcgcccaggacgccctggtacttggcgggaaggcgctcgtagtcccgctgggctcgcagccccgacacagtgttggtggtgtcctgcagggcgcgaagctgctcgcatgccgcgcgaaatccctcgggcgatttccaggcccccccgcgaacgcggccgaagcgaccccatacctcgtcccactccgcctcggcctcctcgagagacctccgcagggcctcgacgcggcgacgggtgtcgaagagcgcctgcaggcgcgcgccctgtcgcgtcaggaggcccgggccgtcgccgctggccgcgcttagcgggtgcgtctcaaaggtacgctgggcatgttccaaccaggcgaccgcctgcacgtcgagctcgcgcgccttctccgtctggtccaccagaatttcgacctgatccgcgatctcctccgccgagcgcgcctggtccagcgtcttggccacggtcgccgggacggcgaccaccttcagcagggtcttcagattggccagaccctcggcctcgagctgggcccggcgctcgcgcgcggccagcacctcccgcagccccgccgtgacccgctcggtggcttcggcgcgctgctgtttggcgcgcaccacggcgtccttggtatcggccaggtcctgtcgggtcacgaatgcgacgtagtcggcgtacgccgtgtccttcacggggctctggtccacgcgctccagcgccgccacgcacgccaccagcgcgtcctcgctcgggcagggcagggtgacccctgcccggacaagctcggcggccgccgccgggtcgttgcgcaccgcggatatctcctccgcggcggcggccaggtccagcgccacgcttccgatcgcgcgccgcgcgtcggcccggagggcgtccaggcgatcgcggatatccacgtactcggcgtagcccttttgaaaaaacggcacgtactggcgcagggccggcacgccccccaagtcttccgacaggtgtaggacggcctcgtggtagtcgataaacccgtcgttcgcctgggcccgctccagcagcccccccgccagccgcagaagccgcgccaggggctcggtgtccacccgaaacatgtcggcgtacgtgtcggccgcggccccgaaggccgcgctccagtcgatgcggtgaatggctgcgagcggggggagcatggggtggcgctggttctcgggggtgtatgggttaaacgcaagggccgtctccagggcaagggtcaccgccttggcgttggttcccagcgcctgttcggcccgctttcggaagtcccgggggttgtagccgtgcgtgcccgccagcgcctgcaggcgacggagctcgaccacgtcaaactcggcaccgctttccacgcggtccagcacggcctccacgtcggcggcccagcgctcgtggctactgcgggcgcgctgggccgccatcttctctctgaggtcggcggtggcggcctcaagttcgtcggcgcggcgtcgcgtggcgccgatgacctttcccagctcctgcagggcgcgcccgctgggggagtggtccccggccgtcccttcggcgtgcaacaggcccccgaacctgccctcgtggcccgcgaggctttcccgcgcgccggtggtcgcgcgcgtcgcggcctggatcagggaggcatgctctccctccggttggttggcggcccggcgcacctggacgacaaggtcggcggcagccgaccctaaggtcgtgagctgggcgatggccacccgcgcgtccagggccaaccgagtcgccttgacgtatcccgcggcgctgtcggccatggccgctaggaaggccaggggggaggccgggtcgctggcggccgcgcccagggccgtcaccgcgtcgaccaggacgcggtgcgcccgcacggccgcatccaccgtcgacgcagggtctgccgttgcgacggcggcgctgccggcgttgatggcgttcgagacggcgtgggctatgatcggggcgtgatcggcgaagaactgcaagagaaacggagtctctggggcgtcggcgaacaggttcttcagcaccaccacgaagctgggatgcaagccagacagagccgtcgccgtgtccggagtcgggtgctccagggcatctcggtactgccccagcagcccccacatgtccgcccgcagcgccgccgtaacctcagggggcgccccccgaacggcctcggggaggtccgaccagcccgccggcagggaggcccgcagggtcgccaggacggccggacaggcctttagccccacaaagtcagggagggggcgcaggaccccctggagtttgtgcaagaacttctcccgggcgtcgcgggccaccttcgcccgctcccgcgctccctcgagcattgcctccagggagcgcgcgcgctcccgcaaacgggcacgcgcatcgggggcgagctctgccgtcagcttggcggcatccatggcccgcgcctgccgcagcgcttcctcggccatgcgcgtggcctctggcgacagcccgccgtcgtcggggtagggcgacgcgccgggcgcaggaacaaaggccgcgtcgctgtccagctgctggcccagggccgcatctagggcgtcgaagcgccgcagctcggccagacccgagctgcggcgcgcctgttggtcgttaatgtcgcggatgctgcgcgccagctcgtccagtggcttgcgttctatcagcccttggttggcggcgtccgtcaggacggagagccaggccgccaggtcctcgggggcgtccagcgtctggccccgctggatcagatcccgcaacaggatggccgtggggctggtcgcgatcgggggcggggcgggaatggcggcgcgctgcgcgatgtcccgcgtgtgctggtcgaagacaggcagggactcgagcagctggaccacgggcacgacggcggccgaagccacgtgaaaccggcggtcgttgttgtcgctggcctgtagagccttggcgctgtatacggccccccggtaaaagtactccttaaccgcgccctcgatcgcccgacgggcctgggtccgcacctcctccagccgaacctgaacggcctcggggcccagggggggtgggcgcggagccccctgcggggccgccccggccggggcgggcattacgccgaggggcccggcgtgctgtgagaccgcgtcgaccccgcgagcgagggcgtcgagggcctcgcgcatctggcgatcctccgcctccaccctaatctcttcgccacgggcaaatttggccagagcctggactctatacagaagcggttctgggtgcgtcggggtggcgggggcaaaaagggtgtccgggtgggcctgcgagcgctccagaagccactcgccgaggcgtgtatacagattggccggcggggccgcgcgaagctgcagctccaggtccgcgagttccccgtaaaaggcgtccgtctcccgaatgacatccctagccacaaggatcagcttcgccagcgccaggcgaccgatcagagagttttcgtccagcacgtgctggacgaggggcagatgggcggccacgtcggccaggctcaggcgcgtggaggccagaaagtcccccacggccgttttccagggcagcatgttcagggtaaactccagcagggcggcggccgggccggccaccccggcctgggtgtgcgtccgggccccgttctcgatgagaaaggcgaggacgcgttcaaagaaaaaaataacacagagctccagcagccccggagaggccggatacggcgaccgtaaggcgctgatggtgagccgcgaacacgcggcgacctcgcgggccagggcggcggagcacgcggtgaacttaaccgccgtggcggccacgtttgggtgggcctcgaacagctgggcgaggtctgcgcccgggggctcgggcgagcggcgagtcttcagcgcctcgagggcctgtgaggacgccggaaccgtgggcccgtcgtcctcgcccgcctcggcgaccggcggcccggccgggtcggggggtgccgaggcgaggacaggctccggaacggaggcggggaccgcggccccgacgggggttttgcctttgggggtggatttcttcttggttttggcagggggggccgagcgtttcgttttctcccccgaagtcaggtcttcgacgctggaaggcggagtccaggtgggtcggcggcgcttgggaaggccggccgagtagcgtgcccggtgccgaccaaccgggacgacgcccatctccaggacccgcatgtcgtcgtcatcttcttcggccgcctctgcggcgggggtcttgggggcggagggaggcggtggtgggatcgcggagggtgggtcggcggagggtgggtcggcggaggggggatccgtgggtggggtacccttcagggccaccgcccatacatcgtcgggcgcccgattcgggcgcttggcctctggttttgccgacggaccggccgtcccccgggatgtctcggaggccctgtcgtcgcgacgggcccgggtcggtggcggcgactgggcggctgtgggcgggtgtggccccgggccccctaccccctcccgggggcccacgccgacgcagggctcccccaggcccgcgatctcgccccgcagggggtgcgtgatggccacgcgccgttcgctgaacgcttcgtcctgcaggtaagtctcgctggccccgtaaagatgcagagccgcggccgtcaagtccgcaggagccgcgggttccgggcccgacggcacgaaaaacaccatggctcccgcccaccgtacgtccgggcgatcgcgggtgtaatacgtcaggtatggatacatgtcccccgcccgcactttggcgatgaacgcgggggtgccctccggaaggccgtgcgggtcaaaaaggtatgcggtgtcgccgtccctgaacagccccatccctagggggccaatggttaggagcgtgtacgacagggggcgcagggcccacgggccggcgaagaacgtgtgtgcggggcattgtgtctccagcaggcccgccgcgggctccccgaagaagcccacctcgccgtatacgcgcgagaagacacagcgcagtccgccgcgcgcccctgggtactcgaggaagttggggagctcgacgatcgaacacatgcgcggcggcccagggcccgcggtcgcgcgcgtccactcgcccccctcgaccaaacatccctcgatggcctccgcggacaggacgtcgcgagggcccacatcaaatatgaggctgagaaaggacagcgacgagcgcatgcacgataccgacccccccggctccaggtcgggcgcgaactggttccgagcaccggtgaccacgatgtcgcgatcccccccgcgttccatcgtggagtgcggtggggtgcccgcgatcatatgtgccctgctggccagagacccggcctgtttatggaccggacccccggggttagtgttgtttccgccacccatgcccccgtaccatggccccggttcccctgattaggctacgagtcgcggtgatcgcttcccaaaaaccgagctgcgtttgtctgtcttggtcttccacccccccccccgcccgcccgcacaccataacaccgagaacaacacacgggggtgggcgtaacataataaagctttattggtaactagttaacggcaagtccgtgggtggcgcgacggtgtcctccgggatcatctcgtcgtcctcgacgggggtgttggaatgaggcgccccctcgcggtccgcctggcgtgggccgtgcccataggcctccggcttctgtgcgtccatgggcataggcgcggggagactgtttccggcgtcgcggacctccaggtccctgggagactccggtccggctaacggacgaaacgcggaagcgcgaaacacgccgtcggtgacccgcaggagctcgttcatcagtaaccaatccatactcagcgtaacggccagcccctggcgagacagatccacggagtccggaaccgcggtcgtctggcccagggggccgaggctgtagtccccccaggcccctaggtcgcgacggctcgtaagcacgacgcggtcggccgcggggctttgcgggggggcgtcctcgggcgcatgcgccattacctctcggatggccgcggcgcgctggtcggccgagctgaccaagggcgccacgaccacggcgcgctccgtctgcaggcccttccacgtgtcgtggagttcctggacaaactcggccacgggctcgggtcccgcggccgcgcgcgcggcttgatagcaggccgacagacgccgccagcgcgctagaaactgacccatgaagcaaaacccggggacctggtctcccgacagcagcttcgacgcccgggcgtgaatgccggacacgacggacagaaacccgtgaatttcgcgccggaccacggccagcacgttgtcctcgtgcgacacctgggccgccagctcgtcgcacacccccaggtgcgccgtggtttcggtgatgacggaacgcaggctcgcgagggacgcgaccagcgcgcgcttggcgtcgtgatacatgctgcagtactgactcaccgcgtcccccatggcctcggggggccagggccccaggcggtcgggcgtgtccccgaccaccgcatacaggcggcgcccgtcgctctcgaaccgacactcgaaaaaggcggagagcgtgcgcatgtgcagccgcagcagcacgatggcgtcctccagttggcgaatcagggggtctgcgcgctcggcgaggtcctgcagcaccccccgggcggccagggcgtacatgctaatcaacaggaggctggtgcccacctcggggggcggggggggctgcagctggaccaggggccgcagctgctcgacggcacccctggagatcacgtacagctcccggagcagctgctctatgttgtcggccatctgcatagtggggccgaggccgccccgggcggccggttcgaggagggtgatcagcgcgcccagtttggtgcgatggccctcaaccgtggggagatagcccagcccaaagtcccgggcccaggccaacacacgcagggcgaactcgaccgggcggggaaggtaggccgcgctacacgtggccctcagcgcgtccccgaccaccagggccagaacgtaggggacgaagcccgggtcggcgaggacgttggggtgaatgccctcgagggcggggaagcggatctgggtcgccgcggccaggtggacagagggggcgtggctgggctgcccgacggggagaagcgcggacagcggcgtggccggggtggtgggggtgatgtcccagtgggtctgaccatacacgtcgatccagatgagcgccgtctcgcggagaaggctgggttgaccggaactaaagcggcgctcggccgtctcaaactcccccacgagcgcccgccgcaggctcgccagatgttccgtcggcacggccggacccatgatacgcgccagcgtctggcttagaacgccccccgacaggccgaccgcctcgcagagccgcccgtgcgtgtgctcgctggcgccctggacccgcctgaaagtttttacgtagttggcatagtacccgtattcccgcgccaacccaaacacgttcgaccccgcgagggcaatgcacccaaagagctgctggacttcgccgagtccgtggccggtgggcgtccgcgcggggacgcccgccgccagaaacccctccagggccgaaaggtagtgcgtgcagtgcgagggcgtgaacccagcgtcgatcagggtgttgatcaccacggagggcgaattggtattctggatcaacgtccacgtctgctgcagcagagccagcagccgctgctgggcgccggcggagggctgctccccgagctgcagcaggctggagacggcaggctggaagactgccagtgccgacgaactcaggaacggcacgtcgggatcaaacacggccacgtccgtccgcacgcgcgccattagcgtccccgggggcgcacaggccgagcgcgggctgacgcggctgagggccgtcgacacgcgcacctcctcgcggctgcgaaccatcttgttggcctcgagcggcggaatcattatggccgggtcgatctcccgcacggtgtgctgaaactgcgccaacaggggcggcgggaccacagccccccgctcgggggtcgtcaggtactcgtccaccagggccaacgtaaagagggcccgtgtgaggggagtgagggtcgcgtcgtctatgcgctggaggtgcgccgagaacagcgtcacccgattactcaccagggccaagaaccggaggccctcttgcacgaacggggcggggaagagcaggctgtacgccggggtggtaaggttcgcgctgggctgccccaacgggaccggcgccatcttgagcgacgtctccccaagggcctcgatggaggtccgcgggctcatggccaagcagctcttggtgacggtttgccagcggtctatccactccacggcgcactggcggacgcggaccggccccagggccgccgcggtgcgcaggccggcggaatccagcgcatgggacgtgtcggagccggtgaccgcgaggatggtgtccttgatgacctccatctcccggaaggcctggtcgggggcctcggggagagccaccaccaagcggtgtacgagcaacccggggaggttctcggccaagagcgccgtctccggaagcccgtgggcccggtggagcgcgcacaggtgttccagcagcggccgccagcatgcccgcgcgtctgccggggcgatggccgttcccgacaacagaaacgccgccatggcggcgcgcagcttggccgtggccagaaacgccgggtcgtccgccccgtttgccgtctcggccgtgggggttggcggttggcgaaggccggctaggctcgccaataggcgctgcataggtccgtccgagggcggaccggcgggtgaggtcgtgacgacgggggcctcggacgggagaccgcggtctgccatgacgcccggctcgcgtgggtgggggacagcgtagaccaacgacgagaccgggcgggaatgactgtcgtgcgctgtagggagcggcgaattatcgatcccccgcggccctccaggacccccgcaggcgttgcgagtaccccgcgtcttcgcggggtgttatacggccacttaagtcccggcatcccgttcgcggacccaggcccgggggattgtccggatgtgcgggcagcccggacggcgtgggttgcggactttctgcggggcggcccaaatggccctttaaacgtgtgtatacggacgcgccgggccagtcggccaacacaacccaccggaggcggtagccgcgtttggctgtggggtgggtggttccgccttgcgtgagtgtcctttcgacccccccccccctccctcccccgggtcttgctaggtcgcgatctggggtcgcaatgaagaccaatccgctacccgcaaccccttccgtgtggggcgggagtaccgtggaactcccccccacaacacgcgataccgcgggacagggcctgcttcggcgcgtcctgcgccccccgatctctcgccgcgacggcccagggctccccagggggtcgggaccccggagggcggccagcacgctgtggttgcttggcctggacggcacagacgcgccccctggggcgctgacccccaacgacgataccgaacaggccctggacaagatcctgcggggcaccatgcgcgggggggcggccctgatcggctccccgcgccatcatctaacccgccaagtgatcctgacggatctgtgccaacccaacgcggatcgtgctgggacgctgcttctggcgctgcggcaccccgccgacctgcctcacctggcccaccagcgcgccccgccaggccggcagaccgagcggctgggcgaggcctggggccagctgatggaggcgaccgccctggggtcggggcgagccgagagcgggtgcacgcgcgcgggcctagtgtcgtttaacttcctggtggcggcgtgtgccgcctcgtacgacgcgcgcgacgccgccgatgcggtacgggcccacgtcacggccaactaccgcgggacgcgggtgggggcgcgcctggatcgtttttccgagtgtctgcgcgccatggttcacacgcacgtcttcccccacgaggtcatgcggtttttcggggggctggtgtcgtgggtcacccaggacgagctagcgagcgtcaccgccgtgtgcgccgggccccaggaggcggcgcacaccggccacccgggccggccccgctcggccgtgatcctcccggcatgtgcgttcgtggacctggacgccgagctggggctggggggcccgggcgcggcgtttctgtacctggtattcacttaccgccagcgccgggaccaggagctgtgttgtgtgtacgtgatcaagagccagctccccccgcgcgggttggagccggccctggagcggctgtttgggcgcctccggatcaccaacacgattcacggcaccgaggacatgacgcccccggccccaaaccgaaaccccgacttccccctcgcgggcctggccgccaatccccaaaccccgcgttgctcggctggccaggtcacgaacccccagttcgccgacaggctgtaccgctggcagccggacctgcgggggcgccccaccgcacgcacctgtacgtacgccgcctttgcagagctcggcatgatgcccgaggatagtccccgctgcctgcaccgcaccgagcgctttggggcggtcagcgtccccgttgtcattctggaaggcgtggtgtggcgccccggcgagtggcgggcatgcgcgtgagcgtagcaaacgccccgcccacacaacgctccgcccccaaccccttccccgctgtcactcgttgttcgttgacccgggcgtccgccaaataaagccactgaaacccgaaacgcgagtgttgtaacgtcctttgggcgggaggaagccacaaaatgcaaatgggatacatggaaggaacacacccccgtgactcaggacatcggtgtgtccttttgggtttcactgaaactggcccgcgccccacccctgcgcgatgtggataaaaagccagcgcgggtggtttagggtaccacaggtgggtgctttggaaacttgccggtcgccgtgctcctgtgagcttgcgtccctccccggtttcctttgcgctcccgccttccggacctgctctcgcctatcttctttggctctcggtgcgattcgtcaggcagcggccttgtcgaatctcgaccccaccactcgccggacccgccgacgtcccctctcgagcccgccgaaacccgccgcgtctgttgaaatggccagccgcccagccgcatcctctcccgtcgaagcgcgggccccggttgggggacaggaggccggcggccccagcgcagccacccagggggaggccgccggggcccctctcgcccacggccaccacgtgtactgccagcgagtcaatggcgtgatggtgctttccgacaagacgcccgggtccgcgtcctaccgcatcagcgatagcaactttgtccaatgtggttccaactgcaccatgatcatcgacggagacgtggtgcgcgggcgcccccaggacccgggggccgcggcatcccccgctcccttcgttgcggtgacaaacatcggagccggcagcgacggcgggaccgccgtcgtggcattcgggggaaccccacgtcgctcggcggggacgtctaccggtacccagacggccgacgtccccaccgaggcccttgggggcccccctcctcctccccgcttcaccctgggtggcggctgttgttcctgtcgcgacacacggcgccgctctgcggtattcgggggggagggggatccagtcggccccgcggagttcgtctcggacgaccggtcgtccgattccgactcggatgactcggaggacacggactcggagacgctgtcacacgcctcctcggacgtgtccggcggggccacgtacgacgacgcccttgactccgattcgtcatcggatgactccctgcagatagatggccccgtgtgtcgcccgtggagcaatgacaccgcgcccctggatgtttgccccgggacccccggcccgggcgccgacgccggtggtccctcagcggtagacccacacgcgccgacgccagaggccggcgctggtcttgcggccgatcccgccgtggcccgggacgacgcggaggggctttcggacccccggccacgtctgggaacgggcacggcctaccccgtccccctggaactcacgcccgagaacgcggaggccgtggcgcgctttctgggagatgccgtgaaccgcgaacccgcgctcatgctggagtacttttgccggtgcgcccgcgaggaaaccaagcgtgtcccccccaggacattcggcagcccccctcgcctcacggaggacgactttgggcttctcaactacgcgctcgtggagatgcagcgcctgtgtctggacgttcctccggtcccgccgaacgcatacatgccctattatctcagggagtatgtgacgcggctggtcaacgggttcaagccgctggtgagccggtccgctcgcctttaccgcatcctgggggttctggtgcacctgcggatccggacccgggaggcctcctttgaggagtggctgcgatccaaggaagtggccctggattttggcctgacggaaaggcttcgcgagcacgaagcccagctggtgatcctggcccaggctctggaccattacgactgtctgatccacagcacaccgcacacgctggtcgagcgggggctgcaatcggccctgaagtatgaggagttttacctaaagcgttttggcgggcactacatggagtccgtcttccagatgtacacccgcatcgccggctttttggcctgccgggccacgcgcggcatgcgccacatcgccctggggcgagaggggtcgtggtgggaaatgttcaagttctttttccaccgcctctacgaccaccagatcgtaccgtcgacccccgccatgctgaacctggggacccgcaactactacacctccagctgctacctggtaaacccccaggccaccacaaacaaggcgaccctgcgggccatcaccagcaacgtcagtgccatcctcgcccgcaacgggggcatcgggctatgcgtgcaggcgtttaacgactccggccccgggaccgccagcgtcatgcccgccctcaaggtccttgactcgctggtggcggcgcacaacaaagagagcgcgcgtccgaccggcgcgtgcgtgtacctggagccgtggcacaccgacgtgcgggccgtgctccggatgaagggggtcctcgccggcgaagaggcccagcgctgcgacaatatcttcagcgccctctggatgccagacctgtttttcaagcgcctgattcgccacctggacggcgagaagaacgtcacatggaccctgttcgaccgggacaccagcatgtcgctcgccgactttcacggggaggagttcgagaagctctaccagcacctcgaggtcatggggttcggcgagcagatacccatccaggagctggcctatggcattgtgcgcagtgcggccacgaccgggagccccttcgtcatgttcaaagacgcggtgaaccgccactacatctacgacacccagggggcggccatcgccggctccaacctctgcaccgagatcgtccatccggcctccaagcgatccagtggggtctgcaacctgggaagcgtgaatctggcccgatgcgtctccaggcagacgtttgactttgggcggctccgcgacgccgtgcaggcgtgcgtgctgatggtgaacatcatgatcgacagcacgctacaacccacgccccagtgcacccgcggcaacgacaacctgcggtccatgggaatcggcatgcagggcctgcacacggcctgcctgaagctggggctggatctggagtctgccgaatttcaggacctgaacaaacacatcgccgaggtgatgctgctgtcggcgatgaagaccagcaacgcgctgtgcgttcgcggggcccgtcccttcaaccactttaagcgcagcatgtatcgcgccggccgctttcactgggagcgctttccggacgcccggccgcggtacgagggcgagtgggagatgctacgccagagcatgatgaaacacggcctgcgcaacagccagtttgtcgcgctgatgcccaccgccgcctcggcgcagatctcggacgtcagcgagggctttgcccccctgttcaccaacctgttcagcaaggtgacccgggacggcgagacgctgcgccccaacacgctcctgctaaaggaactggaacgcacgtttagcgggaagcgcctcctggaggtgatggacagtctcgacgccaagcagtggtccgtggcgcaggcgctcccgtgcctggagcccacccaccccctccggcgattcaagaccgcgtttgactacgaccagaagttgctgatcgacctgtgtgcggaccgcgccccctacgtcgaccatagccaatccatgaccctgtatgtcacggagaaggcggacgggaccctcccagcctccaccctggtccgccttctggtccacgcatataagcgcggactaaaaacagggatgtactactgcaaggttcgcaaggcgaccaacagcggggtctttggcggcgacgacaacattgtctgcatgagctgcgcgctgtgaccgacaaaccccctccgcgccaggcccgccgccactgtcgtcgccgtcccacgctctcccctgctgccatggattccgcggccccagccctctcccccgctctgacggcccttacgggccagagcgcgacggcggacctggcgatccagattccaaagtgccccgaccccgagaggtacttctacacctcccagtgtcccgacattaaccacctgcgctccctcagcatccttaaccgctggctggaaaccgagcttgttttcgtgggggacgaggaggacgtctccaagctttccgagggcgagctcagcttttaccgcttcctcttcgctttcctgtcggccgccgacgacctggttacggaaaacctgggcggcctctccggcctgtttgagcagaaggacattctccactactacgtggagcaggaatgcatcgaagtcgtacactcgcgcgtgtacaacatcatccagctggtgcttttccacaacaacgaccaggcgcgccgcgagtacgtggccggtaccatcaaccacccggccatccgcgccaaggtggactggttggaagcgcgggtgcgggaatgcgcctccgttccggaaaagttcattctcatgatcctcatcgagggcatcttttttgccgcctcgtttgccgccatcgcctaccttcgcaccaacaaccttctgcgggtcacctgccagtcaaacgacctcatcagccgggacgaggccgtgcacacgacggcctcgtgttacatctacaacaactacctcggcgggcacgccaagcccccgcccgaccgcgtgtacgggctgttccgccaggcggtcgagatcgagatcggatttatccgatcccaggcgccgacggacagccatatcctgagcccggcggcgctggcggccatcgaaaactacgtgcgattcagcgcggatcgcctgttgggccttatccacatgaagccactgttttccgccccaccccccgacgccagctttccgctgagcctcatgtccaccgacaaacacaccaattttttcgagtgtcgcagcacctcctacgccggggcggtcgtcaacgatctgtgagtgtcgcggcgcgcttctacccgtgtttgcccataataaacctctgaaccaaactttgggtctcattgtgattcttgtcagggacgcgggggtgggagaggataaaaggcggcgcaaaaagcagtaaccaggtccgtccagattctgcgggcataggataccataattttattggtgggtcgtttgttcggggacaagcgcgctcgtctgacgtttgggctactcgtcccagaatttggccaggacgtccttgtagaacgcgggtgggggggcctgggtccgcaactgctccagaaacctgtcggcgatatcaggggccgtgatatgccgggtcacgatagatcgcgccaggttttcgtcgcggatgtcctggtagataggcaggcgtttcagaagagtccacggcccccgctccttggggccgataagcgatatgacgtacttaatgtagcggtgttccaccagctcggtgatggtcatgggatcggggagccagtccagggactctggggcgtcgtggatgacgtggcgtcgccggttggccacataactgcggtgctcttccagcagctgcgcgttcgggacctggacgagctcgggcggggtgagtatctccgaggaggacgacctggggccggggtggcccccggtaacgtcccggggatccagggggaggtcctcgtcgtcttcgtatccgccggcgatctgttgggttagaatttcggtccacgagacgcgcgtctcggtgccgccggcggccggcggcagagggggcctggtttccgtggagcgcgagctggtgtgttcccggcggatggcccgccgggtctgagagcgactcgggggggtccagtgacattcgcgcagcacatcctccacggaggcgtaggtgttattgggatggaggtcggtgtggcagcggacaaagagggccaggaactgggggtagctcatcttaaagtactttagtatatcgcgacagttgatcgtgggaatgtagcaggcgctaatatccaacacaatatcacagcccatcaacaggaggtcagtgtccgtggtgtacacgtacgcgaccgtgttggtgtgatagaggttggcgcaggcatcgtccgcctccagctgacccgagttaatgtaggcgtaccccagggcccggagaacgcgaatacagaacagatgcgccagacgcagggccggcttcgagggcgcggcggacggcagcgcggctccggacccggccgtcccccgggtccccgaggccagagaggtgccgcgccggcgcatgttggaaaaggcagagctgggtctggagtcggtgatgggggaaggcggtggagaggcgtccacgtcactggcctcctcgtccgtccggcactgggccgtcgtgcgggccaggatggccttggctccaaacacaaccggctccatacaattgaccccgcgatcggtaacgaagatggggaaaagggacttttgggtaaacacctttaataagcgacagaggcagtgtagcgtaatggcctcgcggtcgtaactggggtatcggcgctgatatttgaccaccaacgtgtacatgacgttccacaggtccacggcaatgggggtgaagtacccggccggggccccaaggccccggcgcttgaccagatggtgtgtgtgggcaaacttcatcatcccgaacaaacccatgtcaggtcaattgtaactgcggatcggcctaactaaggcgtggttggtgcgacggtccgggacacccgagcctgtctctctgtgtatggtgacccagacaacaacaccgacacaagaggacaataatccgttaggggacgctctttataatttcgatggcccaactccacgcggattggtgcagcaccctgcatgcgccggtgcgggccaaccttccccccgctcattgcctcttccaaaagggtgtggcctaacgagctgggggcgtatttaatcaggctagcgcggcgggcctgccgtagtttctggctcggtgagcgacggtccggttgcttgggtcccctggctgccatcaaaaccccaccctcgcagcggcatacgccccctccgcgtcccgcacccgagaccccggcccggctgccctcaccaccgaagcccacctcgtcactgtggggtgttcccagcccgcgttgggatgacggattcccctggcggtgtggcccccgcctcccccgtggaggacgcgtcggacgcgtccctcgggcagccggaggagggggcgccctgccaggtggtcctgcagggcgccgaacttaatggaatcctacaggcgtttgccccgctgcgcacgagccttctggactcgcttctggttatgggcgaccggggcatccttatccataacacgatctttggggagcaggtgttcctgcccctggaacactcgcaattcagtcggtatcgctggcgcggacccacggcggcgttcctgtctctcgtggaccagaagcgctccctcctgagcgtgtttcgcgccaaccagtacccggacctacgtcgggtggagttggcgatcacgggccaggccccgtttcgcacgctggttcagcgcatatggacgacgacgtccgacggcgaggccgttgagctagccagcgagacgctgatgaagcgcgaactgacgagctttgtggtgctggttccccagggaacccccgacgttcagttgcgcctgacgaggccgcagctcaccaaggtccttaacgcgaccggggccgatagtgccacgcccaccacgttcgagctcggggttaacggcaaattttccgtgttcaccacgagtacctgcgtcacctttgctgcccgcgaggagggcgtgtcgtccagcaccagcacccaggtccagatcctgtccaacgcgctcaccaaggcgggccaggcggccgccaacgccaagacggtgtacggggaaaatacccatcgcaccttctctgtggtcgtcgacgattgcagcatgcgggcggtgctccggcgactgcaggtcggcgggggcaccctcaagttcttcctcacgacccccgtccccagtctgtgcgtcaccgccaccggtcccaacgcggtatcggcggtatttctcctgaaaccccagaagatttgcctggactggctgggtcatagccaggggtctccttcagccgggagctcggcctcccgggcctctgggagcgagccaacagacagccaggactccgcgtcggacgcggtcagccacggcgatccggaagacctcgatggcgctgcccgggcgggagaggcgggggccttgcatgcctgtccgatgccgtcgtcgaccacgcgggtcactcccacgaccaagcgggggcgctcggggggcgaggatgcgcgcgcggacacggccctaaagaaacctaagacggggtcgcccaccgcacccccgcccgcagatccagtccccctggacacggaggacgactccgatgcggcggacgggacggcggcccgtcccgccgctccagacgcccggagcggaagccgttacgcgtgttactttcgcgacctcccgaccggagaagcaagccccggcgccttctccgccttccgggggggcccccaaaccccgtatggttttggattcccctgacggggcggggccttggcggccgcccaactctcgcaccatcccgggttaatgtaaataaacttggtattgcccaacactttcccgcgtgtcgcgtgtggttcatgtgtgtgcctggcgcccccaccctcgggttcgtgtatttcctttccctgtccttataaaagccgtatgtggggcgctgacggaaccaccccgcgtgccatcacggccaaggcgcgggatgctccgcaacgacagccaccgggccgtgtccccggaggacggccagggacgggtcgacgacggacggccacacctcgcgtgcgtgggggccctggcgcgggggttcatgcatatctggcttcaggccgccacgctgggttttgcgggatcggtcgttatgtcgcgcgggccgtacgcgaatgccgcgtctggggcgttcgccgtcgggtgcgccgtgctgggctttatgcgcgcaccccctcccctcgcgcggcccaccgcgcggatatacgcctggctcaaactggcggccggtggagcggcccttgttctgtggagtctcggggagcccggcacgcagccgggggccccggccccgggcccggccacccagtgcctggcgctgggcgccgcctatgcggcgctcctggtgctcgccgatgacgtctatccgctctttctcctcgccccggggcccctgttcgtcggcaccctggggatggtcgtcggcgggctgacgatcggaggcagcgcgcgctactggtggatcggtgggcccgccgcggccgccctggccgcggcggtgttggcgggcccgggggcgaccaccgccagggactgcttttccagggcttgccccgaccaccgccgcgtctgtgtcatcaccgcaggcgagtctctttcccgccgccccccggaggacccagagcgacccggggttcccgggcccccgtcccccccgaccccccaacgatcccacgggccgccggccgatgaggtcgcaccggccagggtcgcgcggcccgaaaacgtctgggtgcccgtggtcacctttctgggggcgggcgcgcttgccgtcaagacggtgcgagaacatgcccggggaacgccgggcccgggcctgccgctgtggccccaggtgtttctcggaggccatgtggcggtggccctgacggagctgtgtcaggcgcttgcgccctgggaccttacggacccgctgctgtttgttcacgccggactgcaggtcatcaacctcgggttggtgtttcggttttccgaggttgtcgtgtatgcggcgctagggggtgccgtgtggatttcgttggcgcaggtgctggggctccggcgtcgcctgcacaggaaggaccccggggacggggcccggttggcggcgacgcttcggggcctcttcttctccgtgtacgcgctggggtttggggtgggggtgctgctgtgccctccggggtcaacgggcgggcggtcgggcgattgatatatttttcaataaaaggcattagtcccgaagaccgccggtgtgtgatgatttcgccataacacccaaaccccggatggggcccgggtataaattccggaaggggacacgggctaccctcactatcgagggcgcttggtcgggaggccgcatcgaacgcacacccccatccggtggtccgtgtggaggtcgttttcagtgcccggtctcgctttgccgggaacgctagccgatccctcgcgagggggaggcgtcgggcatggccccggggcgggtgggccttgccgtggtcctgtggagcctgttgtggctcggggcgggggtgtccgggggctcggaaactgcctccaccgggcccacgatcaccgcgggagcggtgacgaacgcgagcgaggcccccacatcggggtcccccgggtcagccgccagcccggaggtcacccccacatcgaccccaaaccccaacaatgtcacacaaaacaaaaccacccccaccgagccggccagccccccaacaacccccaagcccacctccacgcccaaaagcccccccacgtccacccccgaccccaaacccaagaacaacaccacccccgccaagtcgggccgccccactaaaccccccgggcccgtgtggtgcgaccgccgcgacccattggcccggtacggctcgcgggtgcagatccgatgccggtttcggaattccacccgcatggagttccgcctccagatatggcgttactccatgggtccgtcccccccaatcgctccggctcccgacctagaggaggtcctgacgaacatcaccgccccacccgggggactcctggtgtacgacagcgcccccaacctaacggacccccacgtgctctgggcggagggggccggcccgggcgccgaccctccgttgtattctgtcaccgggccgctgccgacccagcggctgattatcggcgaggtgacgcccgcgacccagggaatgtattacttggcctggggccggatggacagcccgcacgagtacgggacgtgggtgcgcgtccgcatgttccgccccccgtctctgaccctccagccccacgcggtgatggagggtcagccgttcaaggcgacgtgcacggccgccgcctactacccgcgtaaccccgtggagtttgtctggttcgaggacgaccaccaggtgtttaacccgggccagatcgacacgcagacgcacgagcaccccgacgggttcaccacagtctctaccgtgacctccgaggctgtcggcggccaggtccccccgcggaccttcacctgccagatgacgtggcatcgcgactccgtgacgttctcgcgacgcaatgccaccgggctggccctggtgctgccgcggccaaccatcaccatggaatttggggtccggcatgtggtctgcacggccggctgcgtccccgagggcgtgacgtttgcctggttcctgggggacgacccctcaccggcggctaagtcggccgttacggcccaggagtcgtgcgaccaccccgggctggctacggtccggtccaccctgcccatttcgtacgactacagcgagtacatctgtcggttgaccggatatccggccgggattcccgttctagaacaccacggcagtcaccagcccccacccagggaccccaccgagcggcaggtgatcgaggcgatcgagtgggtggggattggaatcggggttctcgcggcgggggtcctggtcgtaacggcaatcgtgtacgtcgtccgcacatcacagtcgcggcagcgtcatcggcggtaacgcaagacccccccgttacctttttaatatctatatagtttggtcccccctctatcccgcccaccgctgggcgctataaagccgccaccctctcttccctcaggtcatccttggtcgatcccgaacgacacacggcgtggagcaaaacgcctccccctgagccgctttcctaccaacacaacggcatgcctctgcgggcatcggaacacgcctaccggcccctgggccccgggacaccccccatgcgggctcggctccccgccgcggcctgggttggcgtcgggaccatcatcgggggagttgtgatcattgccgcgttggtcctcgtgccctcgcgggcctcgtgggcactttccccatgcgacagcggatggcacgagttcaacctcgggtgcatatcctgggatccgacccccatggagcacgagcaggcggtcggcggctgtagcgccccggcgaccctgatcccccgcgcggctgccaaacagctggccgccgtcgcacgcgtccagtcggcaagatcctcgggctactggtgggtgagcggagacggcattcgggcctgcctgcggctcgtcgacggcgtcggcggtattgaccagttttgcgaggagcccgcccttcgcatatgctactatccccgcagtcccgggggctttgttcagtttgtaacttcgacccgcaacgcgctggggctgccgtgaggcgcgtgtactgcggtctgtctcgtctcctcttctccccttccctccccctccgcatcccaggatcacaccggtcaacgagggttgggggggtccggcacggacccaaaataataaacacacaatcacgtgcgataaaaagaacacgcggtcccctgtggtgtttttggttatttttattaaatctcgtcgacaaacagggggaaaggggcgtggtctagcgacggcagcacgggcggaggcgttcaccggctccggcgtccttcgcgtttaagcttggtcaggagggcgctcagggcggcgacgttggtcgggccgtcgttggtcagggcgttggctcgatggcgggcgaggacgggcgaggggctcaacggcgggggcgggggcccggtgcggcccgggggggaaaatagggcggatcccccccagtcgtacaggggattttccgcctcaatgtacggggaggccggcgctgcattcgccgtgttcacgcagacgttttcgtagacccgcatccatggtatttcctcgtagacacgccccccgtcctcgctcaccgtctcgtatattgactcgtcgtcctcgtagggggcgtgccgttcgcgggccgaggcggcgtgggtggctttgcggcgggcgtcgtcgtcgtcgtcgtcggccgtcagatacgtggcttccatctggtcgggttctccctccggggcgggtccccacacccgtggccgatcgaggctccccagagacgcgcgccggacgaggagggggcacgtcgccgccggcggtcgcctgtcgggtcccgcgacgttacgggccgggaggcgcgggggcacctcccccatgtgcgtgtaatacgtggccggctgtgtggccgcagcggggggctcggcgaccgggtcgttcgcatccggaagcgggggccccgcgccgtccgcgcggcgcctccggaacctccgggtggacgcgggggtcgagtgtaggcgaggtcgggggaggggcgggggctcgttgtcgcgccgcgcccgctgaatcttttcccgacaggtcccaccccccgcgcgatgcccccccgggccgctggccatgtcgtccgggggaggccccgcggaccacgtcgtccggcgagacgccacgagccgcaggatggactcgtagtggagcgacggcgccccgttgcggagcagatccgcggccagggcggccccgaaccaagccttgatgctcaactccatccgggcccagctgggggcggtcatcgtggggaacaggggggcggtggtccgacagaaacgctcctggctgtccaccgcggcccgcagatactcgttgttcaggctgtcggtggcccagacgccgtacccggtgagggtcgcgttgatgatatactgggcgtggtgatggacgatcgacagaacctccaccgtggatacgacggtatccacggtcccgtacgtaccgccgctccgcttgccggtctgccacaggttggctaggcgcgtcaggtggcccaggacgtcgctgaccgccgccctgagcgccatgcactgcatggagccggtcgtgccgctgggaccccggtccagatggcgcgcgaacgtttccgcgggcgcctccgggctgccgccgagcgggaggaaccggcgattggagggactcagccggtgacatacgtgcttgtccgtcgtccacagcatccaggacgcccaccggtacagcacggagacgtaggccaggagctcgttgagccgcagtgcggtgtcggtgctggggcggcttgggtccgccgggcgcataaagaacatgtactgctgaatccgatggagggcgtcgcgcaggccggccacggtggcggcgtacttggccgccacggccccgctcttgaacggggtgcgcgccagcagctttggcgccagggtgggccgcagcagcacgtgaaggctggggtcgcagtcgcccacggggtcctcggggacgtccaggccgctgggcaccaccgtctgcaggtacttccagtactgcgtgaggatggcgcggctcaactggccgccgggcagctccacctcgcccagcgcctgggtggcggccgaagcgtagtgccggatgtactcgtagtgcgggtcgctggcgagcccgtccacgatcaaactctcgggaaccgtgttgtgttgccgcgcggccaaccggacgctgcgatcggtgcaggtcagaaacgccggctgcgcgtcgtcggagcgctgccgcaaggcgcccacggccgcgctaaggagcccctccggggtggggagcagacacccgccgaagatgcgccgctcgggaacgcccgcgttgtcgccgcggatcaggttggcaggcgtcaggcaccgcgccagccgcagggagctcgcgccgcgcgtccggcgctgcatggtgacgcccgttcggtcgggacccgccggtcggagttatgccgcgtccagggccatcggggcgctttttatcgggaggagcttatgggcgtggcgggcctcccagcccggtcgcgcgcctccccgacacgtgcgcccgcagggcggcggccccctcgtctcccatcagcagtttcctaaactgggacatgatgtccaccacgcggacccgcgggcccaacacggacccgccgcttacgggggcgggggggaagggctccaggtccttgagaagaaaggcggggtctgccgtcccggacacgggggcccggggcgctgaggaggcggggcgcagatccacgtgctccgcggccgcgcggacgtccgcccagaacttggcgggggtggtgcgcgcgtacaggggctgggtcgctcggaggacgcacgcgtagcgcaggggggtgtacgtgcccacctcgggggccgtgaatcccccgtcaaacgcggccagtgtcacgcacgccaccacggtgtcggcaaagcccagcagccgctgcaggacgagcccggcggccagaatggcgcgcgtggccgccgcgtcgtcccggcgccggtgcgcgtccccgcacgcccgggcgtactttaaggtcacggtcgccagggccgtgtgcagcgcgtacaccgcagcgcccagcacggcgttgagcccgctgttggcgagcagccggcgcgctgcggtgtcgcccagcgcctcgtgctcggcccccacgaccgcggggcttcccaggggcagggcgcgaaacagctcctcccgcgccacgtccgcaaaggcggggtggtgcacgtgcgggtgcaggcgcgcccccacgaccaccgagagccactggaccgtctgctccgccatcaccgccagcacatccagcacgcgccccaggaaggcggcctcccgcgtcaaaacgcaccggacggcgtcgggattgaagcgggcgagcagggccccggtggccaggtacgtcatgcggccggcatagcgggcggccacgcgacagtcgcggtccagcagcgcgcgcaccccgggccagtacagcagggaccccagcgagctgcggaacaccgcggcgtcggggccggattggggggacactaacccccccgcgctcagtaacggcacggccgcggccccgacgggacgcaacgccgtgaggctcgcgaactgccgcctcagctcggccgccctgtcgtccaggtcagacccgcgcgcctccgcgtgaaggcgcgtcccgcacacccacccgttgatggccagccgcacgacggcatccgccaaaaagctcatcgcctgggcggggctggtttttgttcgacgatccgtcaggtcaagaatcccatcgcccgtgatataccaggccaacgcctcgccctgctgcagggtttggcggaaaaacaccgcggggttgtcgggggaggcgaagtgcatgacccccacgcgcgataacccgaacgcgctatccggacacgggtaaaacccggccggatgccccagggctagggcggagcgcacggactcgtcccacacggcaacctgaggggccagtcgatccaacgggaatgccgcccggagctccgggcccggcacgcgtccctccagaacctccaccttgggcggggaacgggccccgccgccgtcctccggcccgacggcttccgggtagtcgtcctcctcgtactgcagctcctctaggaacagcggcgacggcgccacccgcgaaccgccgacccgccccaaaatagcccgcgcgtcgacgggacccaggtatcccccctgccgggcctgcggaggaccgcggggaacctcatcatcatcgtccaggcgaccgcgcaccgactggctacgggccgcatcgggcccggggcgctgccgggacgctcggcgatgggatgtgggcggggcttccgacgcgcgccgtcgtcgggctcgcgggccttcccgtcgacggcgcacgggcggctcgtcgcccgccatctcctccagagcctctagctcgctgtcgtcatccccgcggaacaccgcacgcaggtaccccatgaaccccaccccatcgcccgctggctcgtccgccacgggcgaggcgcgggggcgggtggatgcgcgcctcctgcgccccgcgggttcgcgagccgacatggtggcgatagacgcgggttatcggatgtccgctaccccccaaaaaagaaaaagaccccacagcgcggatggaggccggggtaggtgccgccggaccccctcgcgatgggaatggacgggagcgacggggccggcgcaaaaaaacgcagtatctcccgcgaaggctacccgccgccccagcccccggccaaatgcggaaacggtcccgcgctctcgcctttatacgcgggccgccctgcgacacaatcacccgtccgtggtttcgaatctacacgacaggcccgcagacgcggctaacacacacgccggcaacccagaccccagtgggttggttgcgcggtcccgtctcctggctagttctttcccccaccaccaaataatcagacgacaaccgcaggttttgtaatgtatgtgctcgtgtttattgtggatacgaaccggtgacgggaggggaaaacccagacgggggatgcgggtccggtcgcgccccctacccaccgtactcgtcaattccaagggcatcggtaaacatctgctcaaactcgaagtcggccatatccagagcgccgtagggggcggagtcgtggggggtaaatcccggccccggggaatccccgtcccccaacatgtccagatcgaaatcgtctagcgcgtcggcatgcgccatcgccacgtcctcgccgtctaagtggagctcgtcccccaggctgacatcggtcgggggggccgtcgacagtctgcgcgtgtgtcccgcggggagaaaggacaggcgcggagccgccagccccgcctcttcgggggcgtcgtcgtccgggagatcgagcaggccctcgatggtagacccgtaattgtttttcgtacgcgcgcggctgtacgcgtgttcccgcatgaccgcctcggagggcgaggtcgtgaagctggaatacgagtccaacttcgcccgaatcaacaccataaagtacccagaggcgcgggcctggttgccatgcagggtgggaggggtcgtcaacggcgcccctggctcctccgtagccgcgctgcgcaccagcgggaggttaaggtgctcgcgaatgtggtttagctcccgcagccggcgggcctcgattggcactccccggacggtgagcgctccgttgacgaacatgaagggctggaacagacccgccaactgacgccagctctccaggtcgcaacagaggcagtcaaacaggtcgggccgcatcatctgctcggcgtacgcggcccataggatctcgcgggtcaaaaatagatacaaatgcaaaaacaaaacacgcgccagacgagcggtctctcggtagtacctgtccgcgatcgtggcgcgcagcatttctcccaggtcgcgatcgcgtccgcgcatgtgcgcctggcggtgcagctgccggacgctggcgcgcaggtaccggtacagggccgagcagaagttggccaacacggttcgatagctctcctcccgcgcccgtagctcggcgtggaagaaacgagagagcgcttcgtagtagagcccgaggccgtcgcgggtggccggaagcgtagggaaggccacgtcgccgtgggcgcgaatgtcgatttgggtgcgttcggggacgtacgcgtccccccattccaccacatcgctgggcagcgttgataggaatttacactcccggtacaggtcggcgttggtcggtagcgccgaaaacagatcctcgttccaggtatcgagcatggtacatagcgcggggcccgcgctaaagcccaagtcgtcgaggagacggttaaagagggcggcgggggggacgggcatgggtggggagggcatgagctgggcctggctcaggcgccccgttgcgtacagcgggggggccgccggggtgtttttgggacccccggccgggcgggggggcggtggcgaagcgccgtccgcgttcatgtcggcaaacagctcgtcgaccaagaggtccattgggtggggttgatacgggaaagacgatatcgggcttttgatgcgatcgtccccgcccgcccagagagtgtgggacgcccgacggcgcgggaagagaaaacccccaaacgcgttagaggaccggacggaccttatggggggaagtgggcagcgggaaccccgtccgttcccgaggaatgacagcccgtggtcgccaccacgcatttaagcaacccgcacgggccgccccgtacctcgtgacttccccccacattggctcctgtcacgtgaaggcgaaccgagggcggctgtccaacccaccccccgccacccagtcccggtccccgtcggattgggaaacaaaggcacgcaacgccaacaccgaatgaacccctgttggtgctttattgtctgggtacggaagttttcactcgacgggccgtctggggcgagaagcggagcgggctggggctcgaggtcgctcggtggggcgcgacgccgcagaacgccctcgagtcgccgtggccgcgtcgacgtcctgcaccacgtctggattcaccaactcgttggcgcgctgaagcaggtttttgccctcgcagaccgtcacgcggatggtggtgatgccaaggagttcgttgaggtcttcgtctgtgcgcggacgcgacatgtcccagagctggaccgccgccatccgggcatgcatggccgccaggcgcccgaccgcggcgcagaagacgcgcttgttaaagccggccacccggggggtccatggcgcgtcggggtttgggggggcggtgctaaagtgcagctttctggccagcccctgcgcgggtgtcttggatcgggttggcgccgtcgacgcgggggcgtctgggagtgcggcggattctggctgggccgatttcctgccgcgggtggtctccgccgccggggccgcgggggccttagtcgccacccgctgggttcggggggcccggggggcggtggtgggtgtgcgtccggcccctccggacccagcgggtggcggaggcgcccgcgcaggccccgggccggacaaaaccgccccggaaacgggacgccgcgtccgggggacctccgggtgttcgtcgtcttcggatgacgagcccccgtagagggcataatccgactcgtcgtactggacgaaacggacctcgcccctctggcgcgagcgtgtctgtagggcgccacggcgggaggtgtcaggcggactatcgggactcgccatacctgaagacggggtgtagtacagatcctcgtactcatcgcgcggaacctcccgcggacccgacttcacggagcggcgagaggtcatggttccacgaacacgctagggtcggatgcgcggacaattaggcctgggttcggacggcgggggtggtgcaggtgtggagaggtcgagcgataggggcggcccgggagagaagagagggtccgcaaaacccactggggatgcgtgagtggccctctgtgggcggtgggggagagtcttataggaagtgcatataaccacaacccatgggtctaaccaatccccaggggccaagaaacagacacgccccaaacggtctcggtttccgcgaggaaggggaagtcctgggacaccctccacccccacccctcaccccacacagggcgggttcaggcgtgcccggcagccagtagcctctggcagatctgacagacgtgtgcgataatacacacgcccatcgaggccatgcctacataaaagggcaccagggcccccggggcagacatttggccagtgttttgggtctcgcaccgcgcgcccccgatcccatcgcgcccgccctcctcgccgggcggctccccgcgcgggcccgcgtctcccgccgctaaggcgacgagcaagacaaacaacaggcccgcccgacagacccttctgggggggcccatcgtccctaacaggaagatgagtcagtggggatccggggcgatccttgtccagccggacagcttgggtcgggggtacgatggcgactggcacacggccgtcgctactcgcgggggcggagtcgtgcaactgaacctggtcaacaggcgcgcggtggcttttatgccgaaggttagcggggactccggatgggccgtcgggcgcgtctctctggacctgcgaatggctatgccggctgacttttgcgcgattattcacgcccccgcgctagccagccccgggcaccacgtaatactgggtcttatcgactcggggtaccgcggaaccgttatggccgtggtcgtagcgcctaaaaggacgcgggaatttgcccccgggaccctgcgggtcgacgtgacgttcctggacatcctggcgacccccccggccctcaccgagccgatttccctgcggcagttcccgcaactggcgcccccccctccaaccggggccgggatacgcgaagatccttggttggagggggcgctcggggccccaagcgtgactacggccctaccggcgcgacgccgagggcggtccctcgtctatgccggcgagctgacgccggttcagacggaacacggggacggcgtacgagaagccatcgccttccttccaaaacgcgaggaggatgccggtttcgacattgtcgtccgtcgcccggtcaccgtcccggcaaacggcaccacggtcgtgcagccatccctccgcatgctccacgcggacgccgggcccgcggcctgctatgtgttggggcggtcgtcgctcaacgcccgcggcctcctggtcgttcctacgcgctggctccccgggcacgtatgtgcgtttgttgtttacaaccttacgggggttcctgtgaccctcgaggccggcgccaaggtcgcccagctcctggttgcgggggcggacgctcttccttggatccccccggacaactttcacgggaccaaagcgcttcgaaactaccccaggggtgttccggactcaaccgccgaacccaggaacccgccgctcctggtgtttacgaacgagtttgacgcggaggcccccccgagcgagcgcgggaccgggggttttggctctaccggtatttagcccacagctttgggttcgttccgggcaataaaaaacgtttgtatcgcatctttcctgtgtgtagttgtttatgttggatgcctgtgggtctatcacacccgcccctccatcccacaaacacaaaacacacgggttggatgaaaacacgcatttattgacccaaaacacacggagctgctcgagatgggccagggcgaggtgcggttggggaggctgtaggtctgggaacggacacgcggggacacgattccggtttggggtccgggagggcgtcgccgtttcgggcggcaggcgccagcgtaacctccgggggcggcgtgtgggggtgccccaaggagggcgcctcggtcaccccaatcccccccgaccgggttcccccggcaaccccgaaggcggagaggccaagggcccgttcggcgatggccacatcctccatgaccacgtcactctcggccatgctccgaatagcctgggagacgagcacatccgcggacttgtcagccgcccccacggacatgtacatctgcaggatggtggccatacacgtgtccgccaggcgccgcatcttgtcctgatgggccgccacggccccgtcgatcgtgggggcctcgagcccggggtggtggcgcgccagtcgttctaggttcaccatgcaggcgtggtacgtgcgggccaaggcgcgggccttcacgaggcgtcgggtgtcgtccagggaccccagggcgtcatcgagcgtgatgggggcgggaagtagcgcgttaacgaccgccagggcctcctgcagccgcggctccgcctccgagggcggaacggccgcgcggatcatctcatattgttcctcggggcgcgctccccagccacatatagccccgagaagagaagccatcgcgggcgggtactggcccttgggcgcgcggacgcaatggggcaggaagacgggaaccgcggggagaggcgggcggccgggactcccgtggaggtgaccgcgctttatgcgaccgacgggtgcgttattacctcttcgatcgccctcctcacaaactctctactgggggccgagccggtttatatattcagctacgacgcatacacgcacgatggccgtgccgacgggcccacggagcaagacaggttcgaagagagtcgggcgctctaccaagcgtcgggcgggctaaatggcgactccttccgagtaaccttttgtttattggggacggaagtgggtgggacccaccaggcccgcgggcgaacccgacccatgttcgtctgtcgcttcgagcgagcggacgacgtcgccgcgctacaggacgccctggcgcacgggaccccgctacaaccggaccacatcgccgccaccctggacgcggaggccacgttcgcgctgcatgcgaacatgatcctggctctcaccgtggccatcaacaacgccagcccccgcaccggacgcgacgccgccgcggcgcagtatgatcagggcgcgtccctacgctcgctcgtggggcgcacgtccctgggacaacgcggccttaccacgctatacgtccaccacgaggtgcgcgtgcttgccgcgtaccgcagggcgtattatggaagcgcgcagagtcccttctggtttcttagcaaattcgggccggacgaaaaaagcctggtgctcaccactcggtactacctgcttcaggcccagcgtctggggggcgcgggggccacgtacgacctgcaggccatcaaggacatctgcgccacctacgcgattccccacgccccccgccccgacaccgtcagcgctgcgtccctgacctcgtttgccgccatcacgcggttctgttgcacgagccagtacgcccgcggggccgcggcggccgggtttccgctttacgtggagcgccgtattgcggccgacgtccgcgagaccagtgcgctggagaagttcataacccacgatcgcagttgcctgcgcgtgtccgaccgtgaattcattacgtacatctacctggcccattttgagtgtttcagccccccgcgcctagccacgcatcttcgggccgtgacgacccacgaccccaaccccgcggccagcacggagcagccctcgcccctgggcagggaggccgtggaacaatttttttgtcacgtgcgcgcccaactgaatatcggggagtacgtcaaacacaacgtgaccccccgggagaccgtcctggatggcgatacggccaaggcctacctgcgcgctcgcacgtacgcgcccggggccctgacgcccgcccccgcgtattgcggggccgtggactccgccaccaaaatgatggggcgtttggcggacgccgaaaagctcctggtcccccgcgggtggcccgcgtttgcgcccgccagtcccggggaggacacggcgggcggcacgccgcccccacagacctgcggaattgtcaagcgcctcctgagactggccgccacggaacagcagggccccacacccccggcgatcgcggcgcttatccgtaatgcggcggtgcagactcccctgcccgtctaccggatatccatggtccccacgggacaggcatttgccgcgctggcctgggacgactgggcccgcataacgcgggacgctcgcctggccgaagcggtcgtgtccgccgaagcggcggcgcaccccgaccacggcgcgctgggcaggcggctcacggatcgcatccgcgcccagggccccgtgatgccccctggcggcctggatgccggggggcagatgtacgtgaatcgcaacgagatattcaacggcgcgctggcaatcacaaacatcatcctggatctcgacatcgccctgaaggagcccgtcccctttcgccggctccacgaggccctgggccactttaggcgcggggctctggctgcggttcagctcctgtttcccgcggcccgcgtggaccccgacgcatatccctgttattttttcaaaagcgcatgtcggcccggcccggcgtccgtgggttccggcagcggactcggcaacgacgacgacggggactggtttccctgctacgacgacgccggtgatgaggagtgggcggaggacccgggcgccatggacacatcccacgatcccccggacgacgaggttgcctactttgacctgtgccacgaagtcggccccacggcggaacctcgcgaaacggattcgcccgtgtgttcctgcaccgacaagatcggactgcgggtgtgcatgcccgtccccgccccgtacgtcgtccacggttctctaacgatgcggggggtggcacgggtcatccagcaggcggtgctgttggaccgagattttgtggaggccatcgggagctacgtaaaaaacttcctgttgatcgatacgggggtgtacgcccacggccacagcctgcgcttgccgtattttgccaaaatcgcccccgacgggcctgcgtgcggaaggctgctgccagtgtttgtgatcccccccgcctgcaaagacgttccggcgtttgtcgccgcgcacgccgacccgcggcgcttccattttcacgccccgcccacctatctcgcttccccccgggagatccgtgtcctgcacagcctgggtggggactatgtgagcttctttgaaaggaaggcgtcccgcaacgcgctggaacactttgggcgacgcgagaccctgacggaggtcctgggtcggtacaacgtacagccggatgcgggggggaccgtcgaggggttcgcatcggaactgctggggcggatagtcgcgtgcatcgaaacccactttcccgaacacgccggcgaatatcaggccgtatccgtccggcgggccgtcagtaaggacgactgggtcctcctacagctagtccccgttcgcggtaccctgcagcaaagcctgtcgtgtctgcgctttaagcacggccgggcgagtcgcgccacggcgcggacattcgtcgcgctgagcgtcggggccaacaaccgcctgtgcgtgtccttgtgtcagcagtgctttgccgccaaatgcgacagcaaccgcctgcacacgctgtttaccattgacgccggcacgccatgctcgccgtccgttccctgcagcacctctcaaccgtcgtcttgataacggcgtacggcctcgtgctcgtgtggtacaccgtcttcggtgccagtccgctgcaccgatgtatttacgcggtacgccccaccggcaccaacaacgacaccgccctcgtgtggatgaaaatgaaccagaccctattgtttctgggggccccgacgcacccccccaacgggggctggcgcaaccacgcccatatctgctacgccaatcttatcgcgggtagggtcgtgcccttccaggtcccacctgacgccatgaatcgtcggatcatgaacgtccacgaggcagttaactgtctggagaccctatggtacacacgggtgcgtctggtggtcgtagggtggttcctgtatctggcgttcgtcgccctccaccaacgccgatgtatgtttggcgtcgtgagtcccgcccacaagatggtggccccggccacctacctcttgaactacgcaggccgcatcgtatcgagcgtgttcctgcagtacccctacacgaaaattacccgcctgctctgcgagctgtcggtccagcggcaaaacctggttcagttgtttgagacggacccggtcaccttcttgtaccaccgccccgccatcggggtcatcgtaggctgcgagttgatgctacgctttgtggccgtgggtctcatcgtcggcaccgctttcatatcccggggggcatgtgcgatcacataccccctgtttctgaccatcaccacctggtgttttgtctccaccatcggcctgacagagctgtattgtattctgcggcggggcccggcccccaagaacgcagacaaggccgccgccccggggcgatccaaggggctgtcgggcgtctgcgggcgctgctgttccatcatcctctcgggcatcgcagtgcgattgtgttatatcgccgtggtggccggggtggtgctcgtggcgcttcactacgagcaggagatccagaggcgcctgtttgatgtatgacgtcacatccaggccggcggaaaccgtaacggcatatgcaaattggaaactgtcctgtcttggggcccacccacccgacgcgtcatatgcaaatgaaaatcggtcccccgaggccacgtgtagcctggatcccaacgaccccgcccatgggtcccaattggccgtcccgttaccaagaccaacccagccagcgtatccacccccgcccgggtccccgcggaagcggaacggggtatgtgatatgctaattaaatacatgccacgtacttatggtgtctgattggtccttgtctgtgccggaggtggggcgggggccccgcccggggggcggaacgaggaggggtttgggagagccggccccggcaccacgggtataaggacatccaccacccggccggtggtggtgtgcagccgtgttccaaccacggtcacgcttcggtgcctctccccgattcgggcccggtcgctcgctaccggtgcgccaccaccagaggccatatccgacaccccagccccgacggcagccgacagcccggtcatggcgactgacattgatatgctaattgacctcggcctggacctctccgacagcgatctggacgaggacccccccgagccggcggagagccgccgcgacgacctggaatcggacagcagcggggagtgttcctcgtcggacgaggacatggaagacccccacggagaggacggaccggagccgatactcgacgccgctcgcccggcggtccgcccgtctcgtccagaagaccccggcgtacccagcacccagacgcctcgtccgacggagcggcagggccccaacgatcctcaaccagcgccccacagtgtgtggtcgcgcctcggggcccggcgaccgtcttgctcccccgagcagcacgggggcaaggtggcccgcctccaacccccaccgaccaaagcccagcctgcccgcggcggacgccgtgggcgtcgcaggggtcggggtcgcggtggtcccggggctgccgatggtttgtcggacccccgccggcgtgcccccagaaccaatcgcaaccctgggggaccccgccccggggcggggtggacggacggccccggcgccccccatggcgaggcgtggcgcggcagtgagcagcccgacccacccggaggccagcggacacggggcgtgcgccaagcaccccccccgctaatgacgctggcgattgcccccccgcccgcggacccccgcgccccggccccggagcgaaaggcgcccgccgccgacaccatcgacgccaccacgcggttggtcctgcgctccatctccgagcgcgcggcggtcgaccgcatcagcgagagctttggccgcagcgcacaggtcatgcacgacccctttggggggcagccgtttcccgccgcgaatagcccctgggccccggtgctggcgggccaaggagggccctttgacgccgagaccagacgggtctcctgggaaaccttggtcgcccacggcccgagcctctatcgcacttttgccggcaatcctcgggccgcatcgaccgccaaggccatgcgcgactgcgtgctgcgccaagaaaatttcatcgaggcgctggcctccgccgacgagacgctggcgtggtgcaagatgtgcatccaccacaacctgccgctgcgcccccaggaccccattatcgggacggccgcggctgtgctggataacctcgccacgcgcctgcggccctttctccagtgctacctgaaggcgcgaggcctgtgcggcctggacgaactgtgttcgcggcggcgtctggcggacattaaggacattgcatccttcgtgtttgtcattctggccaggctcgccaaccgcgtcgagcgtggcgtcgcggagatcgactacgcgacccttggtgtcggggtcggagagaagatgcatttctacctccccggggcctgcatggcgggcctgatcgaaatcctagacacgcaccgccaggagtgttcgagtcgtgtctgcgagttgacggccagtcacatcgtcgcccccccgtacgtgcacggcaaatatttttattgcaactccctgttttaggtacaataaaaacaaaacatttcaaacaaatcgcccctcgtgttgtccttctttgctcatggccggcggggcgtgggtcacggcagatggcgggggtgggcccggcgtacggcctgggtgggcggagggaactaacccaacgtataaatccgtccccgttccaaggccggtgtcatagtgcccttaggagcttcccgcccgggcgcatccccccttttgcactatgacagcgacccccctcaccaacctgttcttacgggccccggacataacccacgtggcccccccttactgcctcaacgccacctggcaggccgaaacggccatgcacaccagcaaaacggactccgcttgcgtggccgtgcggagttacctggtccgcgcctcctgtgagaccagcggcacaatccactgctttttctttgcggtatacaaggacacccaccacacccctccgctgattaccgagctccgcaactttgcggacctggttaaccacccgccggtcctacgcgaactggaggataagcgcggggtgcggctgcggtgtgcgcggccgtttagcgtcgggacgattaaggacgtctctgggtccggcgcgtcctcggcgggagagtacacgataaacgggatcgtgtaccactgccactgtcggtatccgttctcaaaaacatgctggatgggggcctccgcggccctacagcacctgcgctccatcagctccagcggcatggccgcccgcgcggcagagcatcgacgcgtcaagattaaaattaaggcgtgatctccaacccccccatgaatgtgtgtaaccccccccaaaaaaataaagagccgtaacccaaccaaaccaggcgtggtgtgagtttgtggacccaaagccctcagagacaacgcgacaggccagtatggaccgtgatacttttatttattaactcacaggggcgcttaccgccacaggaataccagaataatgaccaccacaatcgcgaccaccccaaatacagcatggcgccacaccacgccacaacagccctgtcgccggtatggggcatgatcagacgagccgcgcgccgcgcgttgggccctgtacagctcgcgcgaattgaccctaggaggccgccacgcgcccgagttttgcgttcgtcgctggtcgtcgggcgccaaagccccggacggctgttcggtcgaacgaacggccacgacagtggcataggttggggggtggtccgacatagcctcggcgtacgtcgggaggcccgacaagaggtcccttgtgatgtcgggtggggccacaagcctggtttccggaagaaacaggggggttgccaataacccgccagggccaaaactccggcgctgcgcacgtcgttcggcgcggcgccgggcgcgccgagcggctcgctgggcggcttggcgtgagcggccccgctccgacgcctcgccctctccggaggaggttggcggaattggcacggacaacaggggcccagcagagtacggtggaggtgggtccgtgggggtgtccagatcaataacgacaaacggcccctcgttcctaccagacaagctatcgtaggggggcgggggatcagcaaacgcgttccccgcgctccataaacccgcgtcgggttgcgccgcctccgaagccatggatgcgccccaaagccacgactcccgcgcgctaggtccttggggtaatggaaaaggccctactccccatccaagccagccaagttaacgggctacgccttcgggaatgggactggcaccccggcggattttgttgggctggcatgcgtcgcccaaccgagggccgcgtccacgggacgcgccttttataaccccgggggtcattcccaacgatcacatgcaatctaactggctcccctctccccccctctcccctctccccccctctcccctctccccccctctcccctctccccccctctcccctctccccccctctcccctctccccccctctcccctctccccccctctcccctctccccccctctcccctctccccccctctcccctctccccccctctcccctctcccctctgctctttccccgtgacacccgacgctgggggcgtggctgccgggaggggccgcggatgggcgggcctacttggtctcccgccccccccccccccccccgaaccgccccgccggctttgcccccctttgatcccctgctacccccaacccgtgctggtggtgcgggttggggggggatgtgggcgggggtgcgcgggaggtgtcggtggtggtggtggtggtggtagtaggaatggtggtgagggggggggggcgctggttggtcaaaaaagggagggacgggggccggcagaccgacggcgacaacgctccccggcggccgggtcgcggctcttacgagcggcccggcccgcgctcccaccccccgggccgtgtccttgctttccccccgtctcccccccccccgccttctcctcctcctcctcgtttttccaaaccccgcccacccggcccggcccggcccggcccggcccggccaccgccgcccacccacccacctcgggatacccagccccggtcccccgttccccgggggccgttatctccagcgccccgtccggcgcgccgccccccgccgctaaaccccatcccgcccccgggaccccacatataagcccccagccacacgcaagaacagacacgcagaacggctgtgtttatttaaataaaccaatgtcggaataaacaaacacaaacacccgcgacggggggacggaggggacggagggagggggtgacgggggacgggaacagacacaaaaacaaccacaaaaaacaaccacccaccgacacccccaccccagtctcctcgccttctcccacccaccccacgcccccactgagcccggtcgatcgacgagcacccccgcccacgcccccgcccctgccccggcgacccccggcccgcacgatcccgacaacaataacaaccccaacggaaagcggcggggtgttgggggaggcgaggaacaaccgaggggaacgggggatggaaggacgggaagtggaagtcctgatacccatcctacacccccctgccttccaccctccggccccccgcgagtccacccgccggccggctaccgagaccgaacacggcggccgccgcagccgccgcagccgccgccgacaccgcagagccggcgcgcgcactcacaagcggcagaggcagaaaggcccagagtcattgtttatgtggccgcgggccagcagacggcccgcgacaccccccccccgcccgtgtgggtatccggccccccgccccgcgccggtccattaagggcgcgcgtgcccgcgagatatcaatccgttaagtgctctgcagacaggggcaccgcgcccggaaatccattaggccgcagacgaggaaaataaaattacatcacctacccacgtggtgctgtggcctgtttttgctgcgtcatctcagcctttataaaagcgggggcgcggccgtgccgatcgcgggtggtgcgaaagactttccgggcgcgtccgggtgccgcggctctccgggcccccctgcagccggggcggccaaggggcgtcggcgacatcctccccctaagcgccggccggccgctggtctgttttttcgttttccccgtttcgggggtggtgggggttgcggtttctgtttctttaacccgtctggggtgtttttcgttccgtcgccggaatgtttcgttcgtctgtcccctcacggggcgaaggccgcgtacggcccgggacgaggggcccccgaccgcggcggtccgggccccgtccggacccgctcgccggcacgcgacgcgaaaaaggccccccggaggcttttccgggttcccggcccggggcctgagatgaacactcggggttaccgccaacggccggcccccgtggcggcccggcccggggccccggcggacccaaggggccccggcccggggccccacaacggcccggcgcatgcgctgtggtttttttttcctcggtgttctgccgggctccatcgcctttcctgttctcgcttctccccccccccttcttcacccccagtaccctcctccctcccttcctcccccgttatcccactcgtcgagggcgccccggtgtcgttcaacaaagacgccgcgtttccaggtaggttagacacctgcttctccccaatagaggggggggacccaaacgacagggggcgccccagaggctaaggtcggccacgccactcgcgggtgggctcgtgttacagcacaccagcccgttcttttccccccctcccacccttagtcagactctgttacttacccgtccgaccaccaactgcccccttatctaagggccggctggaagaccgccagggggtcggccggtgtcgctgtaaccccccacgccaatgacccacgtactccaagaaggcatgtgtcccaccccgcctgtgtttttgtgcctggctctctatgcttgggtcttactgcctggggggggggagtgcgggggagggggggtgtggaaggaaatgcacggcgcgtgtgtaccccccctaaagttgttcctaaagcgaggatacggaggagtggcgggtgccgggggaccggggtgatctctggcacgcgggggtgggaagggtcgggggagggggggatggagtaccggcccacctggccggcgcgggtgcgcgtgcctttgcacaccaaccccacgtcccccggcggtctctaagaagcaccgccccccctccttcataccaccgagcatgcctgggtgtgggttggtaaccaacacgcccatcccctcgtctcctgtgattctctggctgcaccgcattcttgttttctaactatgttcctgtttctgtctcccccccccccacccctccgccccaccccccaacacccacgtctgtggtgtggccgacccccttttgggcgccccgtcccgccccgccacccctcccatcctttgttgccctatagtgtagttaaccccccccgccctttgtggcggccagaggccaggtcagtccgggcgggcaggcgctcgcggaaacttaacacccacacccaacccactgtggttctggctccatgccagtggcaggatgctttcggggatcggtggtcaggcagcccgggccgcggctctgtggttaacaccagagcctgcccaacatggcacccccactcccacgcacccccactcccacgcacccccactcccacgcacccccactcccacgcacccccactcccacgcacccccactcccacgcacccccactcccacgcacccccactcccacgcacccccactcccacgcatccccgcgatacatccaacacagacagggaaaagatacaaaagtaaacctttatttcccaacagacagcaaaaatcccctgagtttttttttattagggccaacacaaaagacccgctggtgtgtggtgcccgtgtctttcacttttcccctccccgacacggattggctggtgtagtgggcgcggccagagaccacccagcgcccgacccccccctccccacaaacacggggggcgtcccttattgttttccctcgtcccgggtcgacgccccctgctccccggaccacgggtgccgagaccgcaggctgcggaagtccagggcgcccactagggtgccctggtcgaacagcatgttccccacgggggtcatccagaggctgttccactccgacgcgggggccgtcgggtactcggggggcatcacgtggttacccgcggtctcggggagcagggtgcggcggctccagccggggaccgcggcccgcagccgggtcgccatgtttcccgtctggtccaccaggaccacgtacgccccgatgttccccgtctccatgtccaggatgggcaggcagtcccccgtgatagtcttgttcacgtaaggcgacagggcgaccacgctagagacccccgagatgggcaggtagcgcgtgaggccgcccgcggggacggccccggaagtctccgcgtggcgcgtcttccgggcacacttcctcggcccccgcggcccagaagcagcgcgggggccgagggaggtttcctcttgtctccctcccagggcaccgacggccccgcccgaggaggcggaagcggaggaggacgcggccccggcggcggaagaggcggcccccgcgggggtcggggccgaggaggaagaggcagaggaggaagaggcggaggccgccgaggacgtcaggggggtcccgggcccaccctggccgcgcccccccggccctgagtcggagggggggtgcgtcgccgccctcttggcccctgccggcgcgagggggggacgcgtggactggggggaggggttttcctggcccgacccgcgcctcttcctcggacgcaccgccgcctcctgctcgacagaggcggcggaggggagcggggcggcgccggagggggcggcgccgcgggagggcccgtgcccaccctccacgcccggcccccccgagccgcgcgccaccgtcgcacgcgcccggcacagactctgttcttggttcgcggcctgagccagggacgagtgcgactggggcacacggcgcgcgtccgcggggcgggcggccggctccgccccgggggccggggcgcgggggccgggccccggaggcggcgctcgcacgcacggggccacggccgcgcgggggcgcgcgggtcccgacgcggccgcggacgcggggggcccggggcggggggcggagcctggcatgggcgccgcggggggcctgtggggagaggccgggggggagtcgctgatcactatggggtctctgttgtttgcaaggggggcgggtctgttgacaagggggcccgtccggcccctcggccgccccgcctccgcttcaacaaccccaaccccaaccccaacccccccggaggggccagacgccccccgcggcgccgcggctcgcgactggcgggagccgccgccgccgctgctgttggtggtggtgttggtgttactgctgccgtgtggcccgatgggcgccgaggggggcgctgtccgagccgcggccggctggggggctgcgtgagacgccccgcccgtcacggggggcgcggcggcgcctctgcgtgggggggcgcggggcgtccggcggggggcgggcggtacgtagtctgctgcaagagacaacggggggcgcgatcaggttacgccccctccccggcccgccctttcctcgcccgcccgcctattcctccctccccccccctcctcctcctcctcccccagggtccttgccgccccccgcctcacaaaataatgctttatttgtgaaatttgtgatgctattgctttatttcactcctggactggctcccagcagtcaaaggggatgacaagcagaaagtccttcaggttctctttgaaactttcaaaggtgataatctgggttgcacaggaagtttccggggttggagggcagtgctgcttgtagtggctggccatcatggtcaaggggcccttgagcttggtgaggctgccccgcaggccctgcttgtacagctccaggcgggtctgtaggcaggtcggctcctggaggtcaaacatttctgagatgacttctactgtttcattcatctcagcagcagtgtctctactcaggttcaggagacgccgggcctcctggatggcattcacatgctcccagggctgcgtgctggggctgggcgagcgggcgggtgcagagatgctgcaggccacagtgcccaagagcagcaggctctgcagccacatcgatctgacggttcactaaacgagctctgcttatatagacctcccaccgtacacgcctaccgcccatttgcgtcaatggggcggagttgttacgacattttggaaagtcccgttgattttggtgccaaaacaaactcccattgacgtcaatggggtggagacttggaaatccccgtgagtcaaaccgctatccacgcccattgatgtactgccaaaaccgcatcaccatggtaatagcgatgactaatacgtagatgtactgccaagtaggaaagtcccataaggtcatgtactgggcataatgccaggcgggccatttaccgtcattgacgtcaatagggggcgtacttggcatatgatacacttgatgtactgccaagtgggcagtttaccgtaaatactccacccattgacgtcaatggaaagtccctattggcgttactatgggaacatacgtcattattgacgtcaatgggcgggggtcgttgggcggtcagccaggcgggccatttaccgtaagttatgtaacgcggaactccatatatgggctatgaactaatgaccccgtaattgattactattaataactgggggtcgtatgcggctggagggtcgcggacggagggtccctgggggtcgcaacgtaggcggggcttctgtggtgatgcggagagggggcggcccgagtctgcctggctgctgcgtctcgctccgagtgccgaggtgcaaatgcgaccagactgtcgggccagggctaacttataccccacgcctttcccctccccaaaggggcggcagtgacgattcccccaatggccgcgcgtcccaggggaggcaggcccaccgcggggcggccccgtccccggggaccaacccggcgcccccaaagaatatcattagcatgcacggcccggcccccgatttgggggcccaacccggtgtcccccaaagaaccccattagcatgcccctcccgccgacgcaacaggggcttggcctgcgtcggtgccccggggcttcccgccttcccgaagaaactcattaccatacccggaaccccaggggaccaatgcgggttcattgagcgacccgcgggccaatgcgcgaggggccgtgtgttccgccaaaaaagcaattagcataacccggaaccccaggggagtggttacgcgcggcgcgggaggcggggaataccggggttgcccattaagggccgcgggaattgccggaagcgggaagggcggccggggccgcccattaatgagtttctaattaccataccgggaagcggaacaaggcctcttgcaagtttttaattaccataccgggaagtgggcggcccggcccattgggcggtaactcccgcccaatgggccgggccccgaagactcggcggacgctggttggccgggccccgccgcgctggcggccgccgattggccagtcccgcccccgaggcgggcccgccctgtgagggcgggctggctccaagcgtatatatgcgcggctcctgccatcgtctctccggagagcggcttggtgcggagctcccgggagctccgcggaagacccaggccgcctcgggtgtaacgttagaccgagttcgccgggccggctccgcgggccagggcccgggcacgggcctcgggccccaggcacggcccgatgaccgcctcggcctccgccacccggcgccggaaccgagcccggtcggcccgctcgcgggcccacgagccgcggcgcgccaggcgggcggccgaggcccagaccaccaggtggcgcacccggacgtggggcgagaagcgcacccgcgcgggggtcgcgggggtcgcgggggtcgcgggggtcgcgggggtcgcggggggctccggcgccccctccccgcccgcgcgtcgcaggcgcaggcgcgccaggtgctccgcggtgacgcgcaggcggagggcgaggcgcggcggaaggcggaaggggcgcgagggggggtgggaggggtcagccccgccccccgggcccacgccgggcggtgggggccggggccggggggcggcggcggtgggccgggcctctggcgccggctcgggcggggggctgtccggccagtcgtcgtcatcgtcgtcgtcggacgcggactcgggaacgtggagccactggcgcagcagcagcgaacaagaaggcgggggcccaccggcggggggcggcggcggggcggccgcgggcgcgctcctgaccgcgggttccgagttgggcgtggaggttacctgggactgtgcggttgggacggcgcccgtgggcccgggcggccgggggcggcgggggccgcgatggcggcggcggcgggccatggagacagagagcgtgccggggtggtagagtttgacaggcaagcatgtgcgtgcagaggcgagtagtgcttgcctgtctaactcgctagtctcggccgcggggggcccgggctgcccgccgccgccgctttaaagggccgcgcgcgacccccggggggtgtgttttggggggggcccgttttcggggtctggccgctcctccccccgctcctccccccgctcctccccccgctcctccccccgctcctccccccgctcctccccccgctcctccccccgctcctccccccgctcctccccccgctcctccccccgctcctccccccgctcctccccccgctcctccccccgctcctccccccgctcctccccccgctcctccccccgctcctccccccgctcctccccccgctcccgcggccccgccccccacgcccgccgcgcgcgcgcacgccgcccggaccgccgcccgccttttttgcgcgcgcgcgcgcccgcggggggcccgggctgccacaggtgaaaccaacagagcacggcgcactccgcacgtcacacgtcacgtcatccaccacacctgcccaacaacacaactcacagcgacaactcaccgcgcaacaactcctgttcctcatccacacgtcaccgcgcacctcccgctcctccagacgtaccccggcgcaacacaccgctcctgctacacaccaccgcccctccccagccccagccctccccggccccagccctccccggccccagccctccccggccccagccctccccggccccagccctccccggccccagccctccccggccccagccctccccggccccagccctccccggccgcgtcccgcgctccctcgggggggttcgggcatctctacctcagtgccgccaatctcaggtcagagatccaaaccctccgggggcgcccgcgcaccaccaccgcccctcgccccctcccgcccctcgccccctcccgcccctcgccccctcccgcccctcgccccctcccgcccctcgccccctcccgcccctcgccccctcccgcccctcgccccctcccgcccctcgccccctcccgcccctcgccccctcccgcccctcgccccctcccgcccctcgccccctcccgcccctcgccccctcccgcccctcgccccctcccgcccctcgccccctcccgcccctcgccccctcccgcccctcgccccctcccgcccctcgccccctcccgcccctcgccccctcccgcccctcgccccctcccgcccctcgaataaacaacgctactgcaaaacttaatcaggttgttgccgtttattgcgtcttcgggtctcacaagcgccccgccccgtcccggcccgttacagcaccccgtccccctcgaacgcgccgccgtcgtcttcgtcccaggcgccttcccagtccacaacttcccgccgcgggggcgtggccaagcccgcctccgcccccagcacctccacggcccccgccgccgccagcacggtgccgctgcggcccgtggccgaggcccagcgaatcccgggcggcgccggcggcagggcccccgggccgtcgtcgtcgccgcgcagcaccagcgggggggcgtcgtcgtcgggctccagcagggcgcgggcgcaaaagtccctccgcggcccgcgccaccgggccgggccggcgcgcaccgcctcgcgccccagcgccacgtacacgggccgcagcggcgcgcccaggccccagcgcgcgcaggcgcggtgcgagtgggcctcctcctcgcagaagtccggcgcgccgggcgccatggcgtcggtggtccccgaggccgccgcccggccgtccagcgccggcagcacggcccggcggtactcgcgcggggacatgggcaccggcgtgtccgggccgaagcgcgtgcgcacgcggtagcgcacgttgccgccgcggcacaggcgcagcggcggcgcgtcggggtacaggcgcgcgtgcgcggcctccacgcgcgcgaagacccccgggccgaacacgcggcccgaggccagcaccgtgcggcgcaggtcccgcgccgccggccagcgcacggcgcactgcacggcgggcagcagctcgcacgccaggtaggcgtgctgccgcgacaccgcgggcccgtcggcgggccagtcgcaggcgcgcacggtgttgaccacgatgagccgccggtcgccggcgctggcgagcagccccagaaactccacggccccggcgaaggccaggtcccgcgtggacagcagcagcacgccctgtgcgcccagcgccgacacgtcgggggcgccggtccagttgcccgcccaggcggccgtgtccggcccgcacagccggttggccagggccgccagcaggcaggacagcccgccgcgctcggcggaccactccggcggcccccccgaggccccgccgccggccaggtcctcgcccggcagcggcgagtacagcaccaccacgcgcacgtcctcggggtcggggatctggcgcatccaggccgccatgcggcgcagcgggcccgaggcgcgcagggggccaaagaggcggcccccggcggccccgtgggggtgggggttatcgtcgtcgtcgccgccgccgcacgcggcctgggcggcgggggcgggcccggcgcaccgcgcggcgatcgaggccagggcccgcgggtcaaacatgagggccggtcgccaggggacggggaacagcgggtggtccgtgagctcggccacggcgcgcggggagcagtaggcctccagggcggcggccgcgggcgccgccgtgtggctgggccccgggggctgccgccgccagccgcccagggggtcggggccctcggcgggccggcgcgacagcgccacggggcgcgggcgggcctgcgccgcggcggcccggggcgccgcgggctgggcgggggcgggctcgggccccgggggcgtggaggggggcgcgggcgcggggaggggggcgcgggcgtccgagccgggggcgtccgcgccgctcttcttcgtcttcgggggtcgcgggccgccgcctccgggcggccgggccgggccgggactcttgcgcttgcgcccctcccgcggcgcggcggaggcggcggcggccgccagcgcgtcggcggcgtccggtgcgctggccgccgccgccagcagggggcgcaggctctggttgtcaaacagcaggtccgcggcggcggcggccgcggagctcggcaggcgcgggtcccgcggcagcgcggggcccagggccccggcgaccaggctcacggcgcgcacggcggccacggcggcctcgctgccgccggccacgcgcaggtccccgcgcaggcgcatgagcaccagcgcgtcgcgcacgaaccgcagctcgcgcagccacgcgcgcaggcggggcgcgtcggcgtgcggcggcggcggggaagcggggcccgcgggtccctccggccgcggggggctggcgggccgggccccggccagccccgggacggccgccaggtcgccgtcgaagccctcggccagcgcctccaggatcccgcggcaggcggccaggcactcgacggccacgcggccggcctgggcgcggcgcccggcgtcgtcgtcggcgtcggcgtggcgggcggcgtcggggtcgtcgccccccgcgggggaggcgggcgcggcggacagccgccccagggcggcgaggatccccgcggcgccgtacccggcgggcaccgcgcgctcgcccggtgcggcggcggcgacggcggcgaccccctcgtcatctgcgccggcgccggggctccccgcggcccccgtcagcgccgcgttctcgcgcgccaacaggggcgcgtaggcgcggcgcaggctggtcagcaggaagcccttctgcgcgcggtcgtatcggcggctcatggccacggcggccgccgcgtgcgccaggccccagccgaagcggccggccgccatggcgtagcccaggtggggcacggcccgcgccacgctgccggtgatgaaggagctgctgttgcgcgcggcgcccgagatccggaagcaggcctggtccagcgccacgtccccggggaccacgcgcgggttctggagccaccccatggcctccgcgtccggggtgtacagcagccgcgtgatcagggcgtactgctgcgcggcgtcgcccagctcgggcgcccacacggccgccggggcgcccgaggcctcgaaccggcgtcgcgcctcctccgcctcgggcgccccccagaggcccgggcggctgtcgcccaggccgccgtacagcacccgccccgggggcgggggcccggcgccgggccacggctccccgctgacgtacccgtcgcgatagcgcgcgtagaaggcgccggaggccgcgtcggcgtccagctcgacccgccggggctgcccggccgtgaagcggcccgtggcgtcgcggccggccaccgccgcgcgggcccggcggcgctcgatgcggcccgcggaggccgcgggggtcctcgccgccgcccggggcttgggcgcggcctcggagagggggggtggcccgggcgggggcggcgtccgcccgggggctgccggcgccgcgctcgacggaccccgcccgacggcccgcgcctcgcgtgcgtggtcggccgcgtcgttgccgtcgtcgtcctcgtcctcgtcggacgacgaggacgaagaggatgcggacgacgaggacgaggacccggagtccgacgaggtcgatgacgccgatggccgccaccggccgtgacgacgtctccgcggcggctgggccggcgggcgcggcgacaggcggtccgtggggtccggatacgcgccgcgtagcggggcctcccgttcgcggccccgggccggggcccggtcgccggcggcgtcggctgcgtcgtcgtactcgtccccgtcatcgtcgtcggctcgaaaggcgggggtccggggcggcgaggccgcggggtcgggcgtcgggatcgtccggacggcctcctctaccatggaggccagcagagccagctgtcgcggcgagacggcgtccccggcgtcctcgccggcgtcggtgcccgccgcgggggccctcccgtcccgccgggcgtcgtcgaggtcgtgggggtggtcggggtcgtggtcggggtcgtccccgccctcctccgtctccgcgccccacccgagggccccccgctcgtcgcggtctgggctcggggtgggcggcggcccgtcggtggggcccggggagccggggcgctgcttgttctccgacgccatcgccgatgcggggcgatcctccggggatacggctgcgacggcggacgtagcacggtaggtcacctacggactctcgatggggggagggggcgagacccacggaccccgacgacccccgccgtcgacgcggaactagcgcggaccggtcgatgcttgggtgggaaaaaggacagggacggccgatccccctcccgcgcttcgtccgcgtatcggcgtcccggcgcggcgagcgtctgacggtctgtctctggcggtcccgcgtcgggtcgtggatccgtgtcggcagccgcgctccgtgtggacgatcggggcgtcctcgggctcatatagtcccaggggccggcgggaaggaggagcagcggaggccgccggccccccgcccccccggcgggcccaccccgaacggaattccattatgcacgaccccgccccgacgccggcacgccgggggcccgtggccgcggcccgttggtcgaacccccggccccgcccatccgcgccatctgccatgggcggggcgcgagggcgggtgggtccgcgccccgccccgcatggcatctcattaccgcccgatccggcggtttccgcttccgttccgcatgctaacgaggaacgggcagggggcggggcccgggccccgacttcccggttcggcggtaatgagatacgagccccgcgcgcccgttggccgtccccgggccccccggtcccgcccgccggacgccgggaccaacgggacggcgggcggcccaagggccgcccgccttgccgcccccccattggccggcgggcgggaccgccccaagggggcggggccgccgggtaaaagaagtgagaacgcgaagcgttcgcacttcgtcccaatatatatatattattagggcgaagtgcgagcactggcgccgtgcccgactccgcgccggccccgggggcgggcccgggcggcggggggcgggtctctccggcgcacataaaggcccggcgcgaccgacgcccgcagacggcgccggccacgaacgacgggagcggctgcggagcacgcggaccgggagcgggagtcgcagagggccgtcggagcggacggcgtcggcatcgcgacgccccggctcgggatcgggatcgcatcggaaagggacacgcggacgcgggggggaaagacccgcccaccccacccacgaaacacaggggacgcaccccgggggcctccgacgacagaaacccaccggtccgccttttttgcacgggtaagcaccttgggtgggcggaggagggggggacgcgggggcggaggaggggggacgcgggggcggaggaggggggacgcgggggcggaggaggggggacgcgggggcggaggaggggggacgcgggggcggaggagggggctcacccgcgttcgtgccttcccgcaggaggaacgtcctcgtcgaggcgaccggcggcgaccgttgcgtggaccgcttcctgctcgtcgggcggggggaagccactgtggtcctccgggacgttttctggatggccgacatttccccaggcgcttttgcgccttgtgtaaaagcgcggcgtcccgctctccgatccccgcccctgggcacgcgcaagcgcaagcgcccttcccgccccctctcatcggagtctgaggtagaatccgatacagccttggagtctgaggtcgaatccgagacagcatcggattcgaccgagtctggggaccaggatgaagccccccgcatcggtggccgtagggccccccggaggcttggggggcggttttttctggacatgtcggcggaatccaccacggggacggaaacggatgcgtcggtgtcggacgaccccgacgacacgtccgactggtcttatgacgacattcccccacgacccaagcgggcccgggtaaacctgcggctcacgagctctcccgatcggcgggatggggttatttttcctaagatggggcgggtccggtctacccgggaaacgcagccccgggcccccaccccgtcggccccaagcccaaatgcaatgctacggcgctcggtgcgccaggcccagaggcggagcagcgcacgatggacccccgacctgggctacatgcgccagtgtatcaatcagctgtttcgggtcctgcgggtcgcccgggacccccacggcagtgccaaccgcctgcgccacctgatacgcgactgttacctgatgggatactgccgagcccgtctggccccgcgcacgtggtgccgtttgctgcaggtgtccggcggaacctggggcatgcacctgcgcaacaccatacgggaggtggaggctcgattcgacgccaccgcggaacccgtgtgcaagcttccttgtttggagaccagacggtacggcccggagtgtgatcttagtaatctcgagattcatctcagcgcgacaagcgatgatgaaatctccgatgccaccgatctggaggccgccggttcggaccacacgctcgcgtcccagtccgacacggaggatgccccctcccccgttacgctggaaaccccagaaccccgcgggtccctcgctgtgcgtctggaggatgagtttggggagtttgactggaccccccaggagggctcccagccctggctgtctgcggtcgtggccgataccagctccgtggaacgcccgggcccatccgattctggggcgggtcgcgccgcagaagaccgcaagtgtctggacggctgccggaaaatgcgcttctccaccgcctgcccctatccgtgcagcgacacgtttctccggccgtgagtccggtcgccccgacccccttgtatgtccccaaaataaaagaccaaaatcaaagcgtttgtcccagcgtcttaatggcgggaagggcggagagaaacagaccacgcggacatggggggtgtttgggggtttattggcaccgggggctaaagggtggtaaccggatagcagatgtgaggaagtcggggccgttcgccgcgaacggcgatcagagggtcagtttcttgcggaccacggcccggcgatgtgggttgctcgtctgggacctcgggcatgcccatacacgcacaacacggacgccgcaccggatgggacgtcgtaagggggcctggggtagctgggtggggtttgtgcagagcaatcagggaccgcagccagcgcatacaatcgcgctcccgtccgtttgtcccgggcagtaccacgccgtactggtattcgtaccggctgagcagggtctccagggggtggttgggggccgcggggaacggggtccacgccacggtccactcgggcaaaaaccgagtcggcacggcccacggttctcccacccacgcgtctggggtcttgatggcgataaatcttaccccgagccggattttttgggcgtattcgagaaacggcacacacagatccgccgcgcctaccacccacaagtggtagaggcgaggggggctgggttggtctcggtgcagcagtcggaagcacgccacggcgtccacgacctcggtgctctccaaggggctgtcctccgcaaacaggcccgtggtggtgtttggggggcagcgacaggacctagtgcgcacgatcgggcgggtgggtttgggtaagtccatcagcggctcggccaaccgtcgaaggttggccggacgaacgacgaccggggtacccaggggttctgatgccaaaatgcggcactgcctaagcaggaagctccacagggccgggcttgcgtcgacggaagtccggggcagggcgttgttctggtcaaggagggtcattacgttgacgacaacaacgcccatgttggtatattacaggcccgtgtccgatttggggcacttgcagatttgtaaggccacgcacggcggggagacaggccgacgcgggggctgctctaaaaatttaagggccctacggtccacagacccgccttcccgggggggcccttggagcgaccggcagcggaggcgtccgggggaggggagggtgatttacgggggggtaggtcagggggtgggtcgtcaaactgccgctccttaaaaccccggggcccgtcgttcggggtgctcgttggttggcactcacggtgcggcgaatggcctgtcgtaagttttgtcgcgtttacgggggacagggcaggaggaaggaggaggccgtcccgccggagacaaagccgtcccgggtgtttcctcatggccccttttataccccagccgaggacgcgtgcctggactccccgcccccggagacccccaaaccttcccacaccacaccacccagcgaggccgagcgcctgtgtcatctgcaggagatccttgcccagatgtacggaaaccaggactaccccatagaggacgaccccagcgcggatgccgcggacgatgtcgacgaggacgccccggacgacgtggcctatccggaggaatacgcagaggagctttttctgcccggggacgcgaccggtccccttatcggggccaacgaccacatccctcccccgtgtggcgcatctccccccggtatacgacgacgcagccgggatgagattggggccacgggatttaccgcggaagagctggacgccatggacagggaggcggctcgagccatcagccgcggcggcaagcccccctcgaccatggccaagctggtgactggcatgggctttacgatccacggagcgctcaccccaggatcggaggggtgtgtctttgacagcagccatccagattacccccaacgggtaatcgtgaaggcggggtggtacacgagcacgagccacgaggcgcgactgctgaggcgactggaccacccggcgatcctgcccctcctggacctgcatgtcgtctccggggtcacgtgtctggtcctccccaagtaccaggccgacctgtatacctatctgagtaggcgcctgaacccactgggacgcccgcagatcgcagcggtctcccggcagctcctaagcgccgttgactacattcaccgccagggcattatccaccgcgacattaagaccgaaaatatttttattaacacccccgaggacatttgcctgggggactttggcgccgcgtgcttcgtgcagggttcccgatcaagccccttcccctacggaatcgccggaaccatcgacaccaacgcccccgaggtcctggccggggatccgtataccacgaccgtcgacatttggagcgccggtctggtgatcttcgagactgccgtccacaacgcgtccttgttctcggccccccgcggccccaaaaggggcccgtgcgacagtcagatcacccgcatcatccgacaggcccaggtccacgttgacgagttttccccgcatccagaatcgcgcctcacctcgcgctaccgctcccgcgcggccgggaacaatcgcccgccgtacacccgaccggcctggacccgctactacaagatggacatagacgtcgaatatctggtttgcaaagccctcaccttcgacggcgcgcttcgccccagcgccgcagagctgctttgtttgccgctgtttcaacagaaatgaccgccccctgggggcggtgctgtttgcgggttggcacaaaaagaccccgatccgcgtctgtggtgtttttggcatcatgtcgcagggcgccatgcgtgccgttgttcccattatcccattccttttggttcttgtcggtgtatcgggggttcccaccaacgtctcctccaccacccaaccccaactccagaccaccggtcgtccctcgcatgaagcccccaacatgacccagaccggcaccaccgactctcccaccgccatcagccttaccacgcccgaccacacaccccccatgccaagtattggactggaggaggaggaagaggaggagggggccggggacggcgaacatcttgaggggggagatgggacccgtgacaccctaccccagtccccgggcccagccttcccgttggctgaggacgtcgagaaggacaaacccaaccgtcccgtagtcccatcccccgatcccaacaactcccccgcgcgccccgagaccagtcgcccgaagacaccccccaccattatcgggccgctggcaactcgccccacgacccgactcacctcaaagggacgacccttggttccgacgcctcaacataccccgctgttctcgttcctcactgcctcccccgccctggacaccctcttcgtcgtcagcaccgtcatccacaccttatcgtttttgtgtattggtgcgatggcgacacacctgtgtggcggttggtccagacgcgggcgacgcacacaccctagcgtgcgttacgtgtgcctgccgtccgaacgcgggtagggtatggggcgggggatggggagagcccacatgcggaaagcaagaacaataaaggcggtggtatctagttgatatgcatctctgggtgtttttggggtgtggcggacgcggggcggtcattggacggggtgcagttaaatacatgcccgggacccatgaagcatgcgcgacttccgggcctcagaacccacccgaaacggccaacggacgtctgagccaggcctggctatccggagaaacagcacacgacttggcgttctgtgtgtcgcgatgtctctgcgcgcagtctggcatctggggcttttgggaagcctcgtgggggctgttcttgccgccacccatcggggacctgcggccaacacaacggaccccttaacgcacgccccagtgtcccctcaccccagccccctggggggctttgccgtccccctcgtagtcggtgggctgtgcgccgtagtcctgggggcggcatgtctgcttgagctcctgcgtcgtacgtgccgcgggtgggggcgttaccatccctacatggacccagttgtcgtataatttcccccccccccccccttctccgcgtgggtgatgtcgggtccaaactcccgacaccaccagctggcatggtataaatcaccggtgcgccccccaaaccatgtccggcagggggatgggggggcgaatgcggagggcacccaacaacaccgggctaaccaggaaatccgtggccccggcccccaataaagatcgcggtagcccggccgtgtgacactatcgtccataccgaccacaccgacgaatcccccaagggggaggggccattttacgaggaggaggggtataacaaagtctgtctttaaaaagcaggggttagggagttgttcggtcataagcttcagcgcgaacgaccaactaccccgatcatcagttatccttaaggtctcttttgtgtggtgcgttccggtatggggggggctgccgccaggttgggggccgtgattttgtttgtcgtcatagtgggcctccatggggtccgcggcaaatatgccttggtggatgcctctctcaagatggccgaccccaatcgctttcgcggcaaagaccttccggtcctggaccagctgaccgaccctccgggggtccggcgcgtgtaccacatccaggcgggcctaccggacccgttccagccccccagcctcccgatcacggtttactacgccgtgttggagcgcgcctgccgcagcgtgctcctaaacgcaccgtcggaggccccccagattgtccgcggggcctccgaagacgtccggaaacaaccctacaacctgaccatcgcttggtttcggatgggaggcaactgtgctatccccatcacggtcatggagtacaccgaatgctcctacaacaagtctctgggggcctgtcccatccgaacgcagccccgctggaactactatgacagcttcagcgccgtcagcgaggataacctggggttcctgatgcacgcccccgcgtttgagaccgccggcacgtacctgcggctcgtgaagataaacgactggacggagattacacagtttatcctggagcaccgagccaagggctcctgtaagtacgccctcccgctgcgcatccccccgtcagcctgcctctccccccaggcctaccagcagggggtgacggtggacagcatcgggatgctgccccgcttcatccccgagaaccagcgcaccgtcgccgtatacagcttgaagatcgccgggtggcacgggcccaaggccccatacacgagcaccctgctgcccccggagctgtccgagacccccaacgccacgcagccagaactcgccccggaagaccccgaggattcggccctcttggaggaccccgtggggacggtggcgccgcaaatcccaccaaactggcacataccgtcgatccaggacgccgcgacgccttaccatcccccggccaccccgaacaacatgggcctgatcgccggcgcggtgggcggcagtctcctggcagccctggtcatttgcggaattgtgtactggatgcgccgccacactcaaaaagccccaaagcgcatacgcctcccccacatccgggaagacgaccagccgtcctcgcaccagcccttgttttactagatacccccccttaatgggtgcgggggggtcaggtctgcggggttgggatgggaccttaactccatataaagcgagtctggaaggggggaaaggtggacagtcgataagtcggtagcgggggacgcgcacctgttccgcctgtcgcacccacagctttttttgcgaaccgtcccgttccgggatgccgtgccgcccgttgcagggcctggtgctcgtgggcctctgggtctgtgccaccagcctggttgtccgtggccccacggtcagtctggtatcaaactcatttgtggacgccggggccttggggcccgacggcgtagtggaggaagacctgcttattctcggggagcttcgctttgtgggggaccaggtcccccacaccacctactacgatgggggcgtagagctgtggcactaccccatgggacacaaatgcccacgggtcgtgcatgtcgtcacggtgaccgcgtgcccacgtcgccccgccgtggcattcgccctgtgtcgcgcgaccgacagcactcacagccccgcatatcccaccctggagctcaatctggcccaacagccgcttttgcgggtccagagggcaacgcgggactatgccggggtgtacgtgttacgcgtatgggtcggtgacgcgccaaacgccagcctgtttgtcctggggatggccatagccgccgaagggactctggcgtacaacggctcggcctatggctcctgcgacccgaaactgcttccgtcttcggccccgcgtctggccccggcgagcgtataccaacccgcccctaaccaggcctccaccccctcgaccaccacctccaccccctcgaccaccatccccgctccctcgaccaccatccccgctccccaagcatcgaccacgcccttccccacgggagatccaaaaccacaacctcccggggtcaaccacgaacccccatctaatgccacgcgagcgacccgcgactcgcgatacgcgctaacggtgacccagataatccagatagccatccccgcgtccatcatagccctggtgtttctggggagctgtatttgctttatacacagatgtcaacgccgctaccgacgctcccgtcgcccgatttacagcccccagatgcccacgggcatctcatgcgcggtgaacgaagcggccatggcccgcctcggagccgagctcaaatcgcatccgagcaccccccccaaatcccggcgccggtcgtcacgcacgccaatgccctccctgacggccatcgccgaagagtcggagcccgctggggcggctgggcttccgacgccccccgtggaccccacgacacccaccccaacgcctcccctgttggtataggtccacggccactggccgggagcaccacataaccgaccgcagtccctgagttgggaataaaccggtattatttacctatatccgtgtatgtcgatttctttccccccctccccggaaaccaaagaaggaagcaaagaatggatgggaggagttcaggaagccggggagagggcccgcggcgcatttaaggcgttgttgtgttgactttgcctcttctggcgggttggtgcggtgctgtttgttgggctcccattttacccgaagatcggctgctatccccgggacatggatcgcggggcggtggtggggtttcttctcggtgtttgtgttgtatcgtgcttggcgggaacgcccaaaacgtcctggagacgggtgagtgtcggcgaggacgtttcgttgcttccagctccggggcctacggggcgcggcccgacccagaaactactatgggccgtggaacccctggatgggtgcggccccttacacccgtcgtgggtctcgctgatgccccccaagcaggtgcccgagacggtcgtggatgcggcgtgcatgcgcgctccggtcccgctggcgatggcgtacgcccccccggccccatctgcgaccgggggtctacgaacggacttcgtgtggcaggagcgcgcggccgtggttaaccggagtctggttattcacggggtccgagagacggacagcggcctgtataccctgtccgtgggcgacataaaggacccggctcgccaagtggcctcggtggtcctggtggtgcaaccggccccagttccgaccccacccccgaccccagccgattacgacgaggatgacaatgacgagggcgaggacgaaagtctcgccggcactcccgccagcgggaccccccggctcccgcctccccccgcccccccgaggtcttggcccagcgcccccgaagtctcacatgtgcgtggggtgaccgtgcgtatggagactccggaagctatcctgttttcccccggggagacgttcagcacgaacgtctccatccatgccatcgcccacgacgaccagacctactccatggacgtcgtctggttgaggttcgacgtgccgacctcgtgtgccgagatgcgaatatacgaatcgtgtctgtatcacccgcagctcccagaatgtctgtccccggccgacgcgccgtgcgccgcgagtacgtggacgtctcgcctggccgtccgcagctacgcggggtgttccagaacaaaccccccaccgcgctgttcggccgaggctcacatggagcccgtcccggggctggcgtggcaggcggcctccgtcaatctggagttccgggacgcgtccccacaacactccggcctgtatctgtgtgtggtgtacgtcaacgaccatattcacgcctggggccacattaccatcagcaccgcggcgcagtaccggaacgcggtggtggaacagcccctcccacagcgcggcgcggatttggccgagcccacccacccgcacgtcggggcccctccccacgcgcccccaacccacggcgccctgcggttaggggcggtgatgggggccgccctgctgctgtctgcactggggttgtcggtgtgggcgtgtatgacctgttggcgcaggcgtgcctggcgggcggttaaaagcagggcctcgggtaaggggcccacgtacattcgcgtggccgacagcgagctgtacgcggactggagctcggacagcgagggagaacgcgaccaggtcccgtggctggcccccccggagagacccgactctccctccaccaatggatccggctttgagatcttatcaccaacggctccgtctgtatacccccgtagcgatgggcatcaatctcgccgccagctcacaacctttggatccggaaggcccgatcgccgttactcccaggcctccgattcgtccgtcttctggtaaggcgccccatcccgaggccccacgtcggtcgccgaactgggcgaccgccggcgaggtggacgtcggagacgagctaatcgcgatttccgacgaacgcggacccccccgacatgaccgcccgcccctcgccacgtcgaccgcgccctcgccacacccgcgacccccgggctacacggccgttgtctccccgatggccctccaggctgtcgacgccccctccctgtttgtcgcctggctggccgctcggtggctccggggggcttccggcctgggggccgtcctgtgtgggattgcgtggtatgtgacgtcaattgcccgaggcgcataaagggccggtggtccgcctagccgcagcaaattaaaaatcgtgagtcacagcgaccgcaacttcccacccggagctttcttccggcctcgatgacgtcccggctctccgatcccaactcctcagcgcgatccgacatgtccgtgccgctttatcccacggcctcgccagtttcggtcgaagcctactactcggaaagcgaagacgaggcggccaacgacttcctcgtacgcatgggccgccaacagtcggtattaaggcgtcgacgcagacgcacccgctgcgtcggcatggtgatcgcctgtctcctcgtggccgttctgtcgggcggatttggggcgctcctgatgtggctgctccgctaaaagaccgcatcgacacgcgcgtccttcttgtcgtctctcttcccccccatcaccccgcaatttgcacccagcctttaactacattaaattgggttcgattggcaatgttgtctcccggttgatttttgggtgggtggggagtgggtgggtggggagtgggtgggtggggagtgggtgggtggggagtgggtgggtggggagtgggtgggtggggagtgggtgggtggggagtgggtgggtggggagtgggtgggtggggagtgggtgggtggggagtggcaaggaagaaacaagcccgaccaccagacagaaaatgtaaccatacccaaaccgactctgggggctgtttgtggggtcggaaccataggatgaacaaaccaccccgtaccacccgcacccaagggtgcgggtggctcatcggcatctgtccggtatgggttgttccccacccactcgcgttcggacgtcttagaatcatggcggttttctatgccgacatcggttttctcccccgcaataagacacgatgcgataaaatctgtttgtaaaatttattaagggtacaaattgccctagcacaggggtggggttagggccgggtccccacacccaaacgcaccaaacagatgcaggcagtgggtcgagtacagccccgcgtacgaacacgtcgatgcgtgtgtcagacagcaccagaaagcacaggccatcaacaggtcgtgcatgtgtcggtgggtttggacgcggggggccatggtggtgataaagttaatggccgccgtccgccagggccacaggggcgacgtctcttggttggcccggagccactgggtgtggaccagccgcgcgtggcggcccaacatggcccctgtagccgggggcgggggatcgcgcacgtttgcagcgcacatgcgagacacctcgaccacggttcgaaagaaggcccggtggtccgcgggcaacatcaccaggtgcgcaagcgcccgggcgtccagagggtagagccctgagtcatccgaggttggctcatcgcccgggtcttgccgcaagtgcgtgtgggttgggcttccggtgggcgggacgcgaaccgcggtgtggatcccgacgcgggcccgagcgtatgctccatgttgtggggagaaggggtctgggctcgccaggggggcatacttgcccgggctatacagacccgcgagccgtacgtggttcgcggggggtgcgtggggtccggggctcccggggagaccggggctcccggggagaccggggctccctgggagaccggggttgtcgtggatccctggggtcacgcggtaccctggggtctctgggagctcgcggtactctgggttccctaggttctcggggtggtcgcggaacccggggctcccggggaacacgcggtgtcctggggattgttggcggtcggacggcttcagatggcttcgagatcgtagtgtccgcaccgactcgtagtagacccgaatctccacattgccccgccgcttgatcattatcaccccgttgcgggggtccggagatcatgcgcgggtgtcctcgaggtgcgtgaacacctctggggtgcatgccggcggacggcacgccttttaagtaaacatctgggtcgcccggcccaactggggccgggggttgggtctggctcatctcgagagccacgggggggaaccaccctccgcccagagactcgggtgatggtcgtacccgggactcaacgggttaccggattacggggactgtcggtcacggtcccgccggttcttcgatgtgccacacccaaggatgcgttgggggcgatttcgggcagcagcccgggagagcgcagcaggggacgctccgggtcgtgcacggcggttctggccgcctcccggtcctcacgcccccttttattgatctcatcgcgtacgtcggcgtacgtcctgggcccaacccgcatggtgtccaggaaggtgtccgccatttccagggcccacgacatgctcccccccgacgagcaggaagcggtccacgcaacggtcgccgccggtcgcctcgacgaggacgttcctcctgcgggaaggcacgaacgcgggtgagccccctcctccgcccccgcgtcccccctcctccgcccccgcgtcccccctcctccgcccccgcgtcccccctcctccgcccccgcgtcccccctcctccgcccccgcgtccccccctcctccgcccacccaaggtgcttacccgtgcaaaaaaggcggaccggtgggtttctgtcgtcggaggcccccggggtgcgtcccctgtgtttcgtgggtggggtgggcgggtctttcccccccgcgtccgcgtgtccctttccgatgcgatcccgatcccgagccggggcgtcgcgatgccgacgccgtccgctccgacggccctctgcgactcccgctcccggtccgcgtgctccgcagccgctcccgtcgttcgtggccggcgccgtctgcgggcgtcggtcgcgccgggcctttatgtgcgccggagagacccgccccccgccgcccgggcccgcccccggggccggcgcggagtcgggcacggcgccagtgctcgcacttcgccctaataatatatatatattgggacgaagtgcgaacgcttcgcgttctcacttcttttacccggcggccccgcccccttggggcggtcccgcccgccggccaatgggggggcggcaaggcgggcggcccttgggccgcccgccgtcccgttggtcccggcgtccggcgggcgggaccggggggcccggggacggccaacgggcgcgcggggctcgtatctcattaccgccgaaccgggaagtcggggcccgggccccgccccctgcccgttcctcgttagcatgcggaacggaagcggaaaccgccggatcgggcggtaatgagatgccatgcggggcggggcgcggacccacccgccctcgcgccccgcccatggcagatggcgcggatgggcggggccgggggttcgaccaacgggccgcggccacgggcccccggcgtgccggcgtcggggcggggtcgtgcataatggaattccgttcggggtgggcccgccgggggggcggggggccggcggcctccgctgctcctccttcccgccggcccctgggactatatgagcccgaggacgccccgatcgtccacacggagcgcggctgccgacacggatccacgacccgacgcgggaccgccagagacagaccgtcagacgctcgccgcgccgggacgccgatacgcggacgaagcgcgggagggggatcggccgtccctgtcctttttcccacccaagcatcgaccggtccgcgctagttccgcgtcgacggcgggggtcgtcggggtccgtgggtctcgccccctccccccatcgagagtccgtaggtgacctaccgtgctacgtccgccgtcgcagccgtatccccggaggatcgccccgcatcggcgatggcgtcggagaacaagcagcgccccggctccccgggccccaccgacgggccgccgcccaccccgagcccagaccgcgacgagcggggggccctcgggtggggcgcggagacggaggagggcggggacgaccccgaccacgaccccgaccacccccacgacctcgacgacgcccggcgggacgggagggcccccgcggcgggcaccgacgccggcgaggacgccggggacgccgtctcgccgcgacagctggctctgctggcctccatggtagaggaggccgtccggacgatcccgacgcccgaccccgcggcctcgccgccccggacccccgcctttcgagccgacgacgatgacggggacgagtacgacgacgcagccgacgccgccggcgaccgggccccggcccggggccgcgaacgggaggccccgctacgcggcgcgtatccggaccccacggaccgcctgtcgccgcgcccgccggcccagccgccgcggagacgtcgtcacggccggtggcggccatcggcgtcatcgacctcgtcggactccgggtcctcgtcctcgtcgtccgcatcctcttcgtcctcgtcgtccgacgaggacgaggacgacgacggcaacgacgcggccgaccacgcacgcgaggcgcgggccgtcgggcggggtccgtcgagcgcggcgccggcagcccccgggcggacgccgcccccgcccgggccaccccccctctccgaggccgcgcccaagccccgggcggcggcgaggacccccgcggcctccgcgggccgcatcgagcgccgccgggcccgcgcggcggtggccggccgcgacgccacgggccgcttcacggccgggcagccccggcgggtcgagctggacgccgacgcggcctccggcgccttctacgcgcgctatcgcgacgggtacgtcagcggggagccgtggcccggcgccgggcccccgcccccggggcgggtgctgtacggcggcctgggcgacagccgcccgggcctctggggggcgcccgaggcggaggaggcgcgacgccggttcgaggcctcgggcgccccggcggccgtgtgggcgcccgagctgggcgacgccgcgcagcagtacgccctgatcacgcggctgctgtacaccccggacgcggaggccatggggtggctccagaacccgcgcgtggtccccggggacgtggcgctggaccaggcctgcttccggatctcgggcgccgcgcgcaacagcagctccttcatcaccggcagcgtggcgcgggccgtgccccacctgggctacgccatggcggccggccgcttcggctggggcctggcgcacgcggcggccgccgtggccatgagccgccgatacgaccgcgcgcagaagggcttcctgctgaccagcctgcgccgcgcctacgcgcccctgttggcgcgcgagaacgcggcgctgacgggggccgcggggagccccggcgccggcgcagatgacgagggggtcgccgccgtcgccgccgccgcaccgggcgagcgcgcggtgcccgccgggtacggcgccgcggggatcctcgccgccctggggcggctgtccgccgcgcccgcctcccccgcggggggcgacgaccccgacgccgcccgccacgccgacgccgacgacgacgccgggcgccgcgcccaggccggccgcgtggccgtcgagtgcctggccgcctgccgcgggatcctggaggcgctggccgagggcttcgacggcgacctggcggccgtcccggggctggccggggcccggcccgccagccccccgcggccggagggacccgcgggccccgcttccccgccgccgccgcacgccgacgcgccccgcctgcgcgcgtggctgcgcgagctgcggttcgtgcgcgacgcgctggtgctcatgcgcctgcgcggggacctgcgcgtggccggcggcagcgaggccgccgtggccgccgtgcgcgccgtgagcctggtcgccggggccctgggccccgcgctgccgcgggacccgcgcctgccgagctccgcggccgccgccgccgcggacctgctgtttgacaaccagagcctgcgccccctgctggcggcggcggccagcgcaccggacgccgccgacgcgctggcggccgccgccgcctccgccgcgccgcgggaggggcgcaagcgcaagagtcccggcccggcccggccgcccggaggcggcggcccgcgacccccgaagacgaagaagagcggcgcggacgcccccggctcggacgcccgcgcccccctccccgcgcccgcgcccccctccacgcccccggggcccgagcccgcccccgcccagcccgcggcgccccgggccgccgcggcgcaggcccgcccgcgccccgtggcgctgtcgcgccggcccgccgagggccccgaccccctgggcggctggcggcggcagcccccggggcccagccacacggcggcgcccgcggccgccgccctggaggcctactgctccccgcgcgccgtggccgagctcacggaccacccgctgttccccgtcccctggcgaccggccctcatgtttgacccgcgggccctggcctcgatcgccgcgcggtgcgccgggcccgcccccgccgcccaggccgcgtgcggcggcggcgacgacgacgataacccccacccccacggggccgccgggggccgcctctttggccccctgcgcgcctcgggcccgctgcgccgcatggcggcctggatgcgccagatccccgaccccgaggacgtgcgcgtggtggtgctgtactcgccgctgccgggcgaggacctggccggcggcggggcctcgggggggccgccggagtggtccgccgagcgcggcgggctgtcctgcctgctggcggccctggccaaccggctgtgcgggccggacacggccgcctgggcgggcaactggaccggcgcccccgacgtgtcggcgctgggcgcacagggcgtgctgctgctgtccacgcgggacctggccttcgccggggccgtggagtttctggggctgctcgccagcgccggcgaccggcggctcatcgtggtcaacaccgtgcgcgcctgcgactggcccgccgacgggcccgcggtgtcgcggcagcacgcctacctggcgtgcgagctgctgcccgccgtgcagtgcgccgtgcgctggccggcggcgcgggacctgcgccgcacggtgctggcctcgggccgcgtgttcggcccgggggtcttcgcgcgcgtggaggccgcgcacgcgcgcctgtaccccgacgcgccgccgctgcgcctgtgccgcggcggcaacgtgcgctaccgcgtgcgcacgcgcttcggcccggacacgccggtgcccatgtccccgcgcgagtaccgccgggccgtgctgccggcgctggacggccgggcggcggcctcggggaccaccgacgccatggcgcccggcgcgccggacttctgcgaggaggaggcccactcgcaccgcgcctgcgcgcgctggggcctgggcgcgccgctgcggcccgtgtacgtggcgctggggcgcgaggcggtgcgcgccggcccggcccggtggcgcgggccgcggagggacttttgcgcccgcgccctgctggagcccgacgacgacgcccccccgctggtgctgcgcggcgacgacgacggcccgggggccctgccgccggcgccgcccgggattcgctgggcctcggccacgggccgcagcggcaccgtgctggcggcggcgggggccgtggaggtgctgggggcggaggcgggcttggccacgcccccgcggcgggaagttgtggactgggaaggcgcctgggacgaagacgacggcggcgcgttcgagggggacggggtgctgtaacgggccgggacggggcggggcgcttgtgagacccgaagacgcaataaacggcaacaacctgattaagttttgcagtagcgttgtttattcgaggggcgggagggggcgaggggcgggagggggcgaggggcgggagggggcgaggggcgggagggggcgaggggcgggagggggcgaggggcgggagggggcgaggggcgggagggggcgaggggcgggagggggcgaggggcgggagggggcgaggggcgggagggggcgaggggcgggagggggcgaggggcgggagggggcgaggggcgggagggggcgaggggcgggagggggcgaggggcgggagggggcgaggggcgggagggggcgaggggcgggagggggcgaggggcgggagggggcgaggggcgggagggggcgaggggcggtggtggtgcgcgggcgcccccggagggtttggatctctgacctgagattggcggcactgaggtagagatgcccgaacccccccgagggagcgcgggacgcggccggggagggctggggccggggagggctggggccggggagggctggggccggggagggctggggccggggagggctggggccggggagggctggggccggggagggctggggccggggagggctggggctggggaggggcggtggtgtgtagcaggagcggtgtgttgcgccggggtacgtctggaggagcgggaggtgcgcggtgacgtgtggatgaggaacaggagttgttgcgcggtgagttgtcgctgtgagttgtgttgttgggcaggtgtggtggatgacgtgacgtgtgacgtgcggagtgcgccgtgctctgttggtttcacctgtggcagcccgggccccccgcgggcgcgcgcgcgcgcaaaaaaggcgggcggcggtccgggcggcgtgcgcgcgcgcggcgggcgtggggggcggggccgcgggagcggggggaggagcggggggaggagcggggggaggagcggggggaggagcggggggaggagcggggggaggagcggggggaggagcggggggaggagcggggggaggagcggggggaggagcggggggaggagcggggggaggagcggggggaggagcggggggaggagcggggggaggagcggggggaggagcggggggaggagcggggggaggagcggccagaccccgaaaacgggccccccccaaaacacaccccccgggggtcgcgcgcggccctttaaagcggcggcggcgggc

SEQ ID NO: 16 - DNA, 151304 bp, Artificial Sequence
  Recombinant HSV-1 vector
agcccgggccccccgcgggcgcgcgcgcgcgcaaaaaaggcgggcggcggtccgggcggcgtgcgcgcgcgcggcgggcgtggggggcggggccgcgggagcggggggaggagcggggggaggagcggggggaggagcggggggaggagcggggggaggagcggggggaggagcggggggaggagcggggggaggagcggggggaggagcggggggaggagcggggggaggagcggggggaggagcggggggaggagcggggggaggagcggggggaggagcggggggaggagcggggggaggagcggggggaggagcggccagaccccgaaaacgggccccccccaaaacacaccccccgggggtcgcgcgcggccctttaaagcggcggcggcgggcagcccgggccccccgcggccgagactagcgagttagacaggcaagcactactcgcctctgcacgcacatgcttgcctgtcaaactctaccaccccggcacgctctctgtctccatggcccgccgccgccgccatcgcggcccccgccgcccccggccgcccgggcccacgggcgccgtcccaaccgcacagtcccaggtaacctccacgcccaactcggaacccgcggtcaggagcgcgcccgcggccgccccgccgccgccccccgccggtgggcccccgccttcttgttcgctgctgctgcgccagtggctccacgttcccgagtccgcgtccgacgacgacgatgacgacgactggccggacagccccccgcccgagccggcgccagaggcccggcccaccgccgccgccccccggccccggcccccaccgcccggcgtgggcccggggggcggggctgacccctcccaccccccctcgcgccccttccgccttccgccgcgcctcgccctccgcctgcgcgtcaccgcggagcacctggcgcgcctgcgcctgcgacgcgcgggcggggagggggcgccggagccccccgcgacccccgcgacccccgcgacccccgcgacccccgcgacccccgcgcgggtgcgcttctcgccccacgtccgggtgcgccacctggtggtctgggcctcggccgcccgcctggcgcgccgcggctcgtgggcccgcgagcgggccgaccgggctcggttccggcgccgggtggcggaggccgaggcggtcatcgggccgtgcctggggcccgaggcccgtgcccgggccctggcccgcggagccggcccggcgaactcggtctaacgttacacccgaggcggcctgggtcttccgcggagctcccgggagctccgcaccaagccgctctccggagagacgatggcaggagccgcgcatatatacgcttggagccagcccgccctcacagggcgggcccgcctcgggggcgggactggccaatcggcggccgccagcgcggcggggcccggccaaccagcgtccgccgagtcttcggggcccggcccattgggcgggagttaccgcccaatgggccgggccgcccacttcccggtatggtaattaaaaacttgcaagaggccttgttccgcttcccggtatggtaattagaaactcattaatgggcggccccggccgcccttcccgcttccggcaattcccgcggcccttaatgggcaaccccggtattccccgcctcccgcgccgcgcgtaaccactcccctggggttccgggttatgctaattgcttttttggcggaacacacggcccctcgcgcattggcccgcgggtcgctcaatgaacccgcattggtcccctggggttccgggtatggtaatgagtttcttcgggaaggcgggaagccccggggcaccgacgcaggccaagcccctgttgcgtcggcgggaggggcatgctaatggggttctttgggggacaccgggttgggcccccaaatcgggggccgggccgtgcatgctaatgatattctttgggggcgccgggttggtccccggggacggggccgccccgcggtgggcctgcctcccctgggacgcgcggccattgggggaatcgtcactgccgcccctttggggaggggaaaggcgtggggtataagttagccctggcccgacagtctggtcgcatttgcacctcggcactcggagcgagacgcagcagccaggcagactcgggccgccccctctccgcatcaccacagaagccccgcctacgttgcgacccccagggaccctccgtccgcgaccctccagccgcatacgacccccagttattaatagtaatcaattacggggtcattagttcatagcccatatatggagttccgcgttacataacttacggtaaatggcccgcctggctgaccgcccaacgacccccgcccattgacgtcaataatgacgtatgttcccatagtaacgccaatagggactttccattgacgtcaatgggtggagtatttacggtaaactgcccacttggcagtacatcaagtgtatcatatgccaagtacgccccctattgacgtcaatgacggtaaatggcccgcctggcattatgcccagtacatgaccttatgggactttcctacttggcagtacatctacgtattagtcatcgctattaccatggtgatgcggttttggcagtacatcaatgggcgtggatagcggtttgactcacggggatttccaagtctccaccccattgacgtcaatgggagtttgttttggcaccaaaatcaacgggactttccaaaatgtcgtaacaactccgccccattgacgcaaatgggcggtaggcgtgtacggtgggaggtctatataagcagagctcgtttagtgaaccgtcagatcgatgtggctgcagagcctgctgctcttgggcactgtggcctgcagcatctctgcacccgcccgctcgcccagccccagcacgcagccctgggagcatgtgaatgccatccaggaggcccggcgtctcctgaacctgagtagagacactgctgctgagatgaatgaaacagtagaagtcatctcagaaatgtttgacctccaggagccgacctgcctacagacccgcctggagctgtacaagcagggcctgcggggcagcctcaccaagctcaagggccccttgaccatgatggccagccactacaagcagcactgccctccaaccccggaaacttcctgtgcaacccagattatcacctttgaaagtttcaaagagaacctgaaggactttctgcttgtcatcccctttgactgctgggagccagtccaggagtgaaataaagcaatagcatcacaaatttcacaaataaagcattattttgtgaggcggggggcggcaaggaccctgggggaggaggaggaggagggggggggagggaggaataggcgggcgggcgaggaaagggcgggccggggagggggcgtaacctgatcgcgccccccgttgtctcttgcagcagactacgtaccgcccgccccccgccggacgccccgcgcccccccacgcagaggcgccgccgcgccccccgtgacgggcggggcgtctcacgcagccccccagccggccgcggctcggacagcgcccccctcggcgcccatcgggccacacggcagcagtaacaccaacaccaccaccaacagcagcggcggcggcggctcccgccagtcgcgagccgcggcgccgcggggggcgtctggcccctccgggggggttggggttggggttggggttgttgaagcggaggcggggcggccgaggggccggacgggcccccttgtcaacagacccgccccccttgcaaacaacagagaccccatagtgatcagcgactcccccccggcctctccccacaggccccccgcggcgcccatgccaggctccgccccccgccccgggccccccgcgtccgcggccgcgtcgggacccgcgcgcccccgcgcggccgtggccccgtgcgtgcgagcgccgcctccggggcccggcccccgcgccccggcccccggggcggagccggccgcccgccccgcggacgcgcgccgtgtgccccagtcgcactcgtccctggctcaggccgcgaaccaagaacagagtctgtgccgggcgcgtgcgacggtggcgcgcggctcgggggggccgggcgtggagggtgggcacgggccctcccgcggcgccgccccctccggcgccgccccgctcccctccgccgcctctgtcgagcaggaggcggcggtgcgtccgaggaagaggcgcgggtcgggccaggaaaacccctccccccagtccacgcgtccccccctcgcgccggcaggggccaagagggcggcgacgcaccccccctccgactcagggccgggggggcgcggccagggtgggcccgggacccccctgacgtcctcggcggcctccgcctcttcctcctctgcctcttcctcctcggccccgacccccgcgggggccgcctcttccgccgccggggccgcgtcctcctccgcttccgcctcctcgggcggggccgtcggtgccctgggagggagacaagaggaaacctccctcggcccccgcgctgcttctgggccgcgggggccgaggaagtgtgcccggaagacgcgccacgcggagacttccggggccgtccccgcgggcggcctcacgcgctacctgcccatctcgggggtctctagcgtggtcgccctgtcgccttacgtgaacaagactatcacgggggactgcctgcccatcctggacatggagacggggaacatcggggcgtacgtggtcctggtggaccagacgggaaacatggcgacccggctgcgggccgcggtccccggctggagccgccgcaccctgctccccgagaccgcgggtaaccacgtgatgccccccgagtacccgacggcccccgcgtcggagtggaacagcctctggatgacccccgtggggaacatgctgttcgaccagggcaccctagtgggcgccctggacttccgcagcctgcggtctcggcacccgtggtccggggagcagggggcgtcgacccgggacgagggaaaacaataagggacgccccccgtgtttgtggggaggggggggtcgggcgctgggtggtctctggccgcgcccactacaccagccaatccgtgtcggggaggggaaaagtgaaagacacgggcaccacacaccagcgggtcttttgtgttggccctaataaaaaaaaactcaggggatttttgctgtctgttgggaaataaaggtttacttttgtatcttttccctgtctgtgttggatgtatcgcggggatgcgtgggagtgggggtgcgtgggagtgggggtgcgtgggagtgggggtgcgtgggagtgggggtgcgtgggagtgggggtgcgtgggagtgggggtgcgtgggagtgggggtgcgtgggagtgggggtgcgtgggagtgggggtgccatgttgggcaggctctggtgttaaccacagagccgcggcccgggctgcctgaccaccgatccccgaaagcatcctgccactggcatggagccagaaccacagtgggttgggtgtgggtgttaagtttccgcgagcgcctgcccgcccggactgacctggcctctggccgccacaaagggcggggggggttaactacactatagggcaacaaaggatgggaggggtggcggggcgggacggggcgcccaaaagggggtcggccacaccacagacgtgggtgttggggggtggggcggaggggtgggggggggggagacagaaacaggaacatagttagaaaacaagaatgcggtgcagccagagaatcacaggagacgaggggatgggcgtgttggttaccaacccacacccaggcatgctcggtggtatgaaggagggggggcggtgcttcttagagaccgccgggggacgtggggttggtgtgcaaaggcacgcgcacccgcgccggccaggtgggccggtactccatccccccctcccccgacccttcccacccccgcgtgccagagatcaccccggtcccccggcacccgccactcctccgtatcctcgctttaggaacaactttagggggggtacacacgcgccgtgcatttccttccacaccccccctcccccgcactccccccccccaggcagtaagacccaagcatagagagccaggcacaaaaacacaggcggggtgggacacatgccttcttggagtacgtgggtcattggcgtggggggttacagcgacaccggccgaccccctggcggtcttccagccggcccttagataagggggcagttggtggtcggacgggtaagtaacagagtctgactaagggtgggagggggggaaaagaacgggctggtgtgctgtaacacgagcccacccgcgagtggcgtggccgaccttagcctctggggcgccccctgtcgtttgggtcccccccctctattggggagaagcaggtgtctaacctacctggaaacgcggcgtctttgttgaacgacaccggggcgccctcgacgagtgggataacgggggaggaagggagggaggagggtactgggggtgaagaaggggggggggagaagcgagaacaggaaaggcgatggagcccggcagaacaccgaggaaaaaaaaaccacagcgcatgcgccgggccgttgtggggccccgggccggggccccttgggtccgccggggccccgggccgggccgccacgggggccggccgttggcggtaaccccgagtgttcatctcaggccccgggccgggaacccggaaaagcctccggggggcctttttcgcgtcgcgtgccggcgagcgggtccggacggggcccggaccgccgcggtcgggggcccctcgtcccgggccgtacgcggccttcgccccgtgaggggacagacgaacgaaacattccggcgacggaacgaaaaacaccccagacgggttaaagaaacagaaaccgcaacccccaccacccccgaaacggggaaaacgaaaaaacagaccagcggccggccggcgcttagggggaggatgtcgccgacgccccttggccgccccggctgcaggggggcccggagagccgcggcacccggacgcgcccggaaagtctttcgcaccacccgcgatcggcacggccgcgcccccgcttttataaaggctgagatgacgcagcaaaaacaggccacagcaccacgtgggtaggtgatgtaattttattttcctcgtctgcggcctaatggatttccgggcgcggtgcccctgtctgcagagcacttaacggattgatatctcgcgggcacgcgcgcccttaatggaccggcgcggggcggggggccggatacccacacgggcggggggggggtgtcgcgggccgtctgctggcccgcggccacataaacaatgactctgggcctttctgcctctgccgcttgtgagtgcgcgcgccggctctgcggtgtcggcggcggctgcggcggctgcggcggccgccgtgttcggtctcggtagccggccggcgggtggactcgcggggggccggagggtggaaggcaggggggtgtaggatgggtatcaggacttccacttcccgtccttccatcccccgttcccctcggttgttcctcgcctcccccaacaccccgccgctttccgttggggttgttattgttgtcgggatcgtgcgggccgggggtcgccggggcaggggcgggggcgtgggcgggggtgctcgtcgatcgaccgggctcagtgggggcgtggggtgggtgggagaaggcgaggagactggggtgggggtgtcggtgggtggttgttttttgtggttgtttttgtgtctgttcccgtcccccgtcaccccctccctccgtcccctccgtccccccgtcgcgggtgtttgtgtttgtttattccgacattggtttatttaaataaacacagccgttctgcgtgtctgttcttgcgtgtggctgggggcttatatgtggggtcccgggggcgggatggggtttagcggcggggggcggcgcgccggacggggcgctggagataacggcccccggggaacgggggaccggggctgggtatcccgaggtgggtgggtgggcggcggtggccgggccgggccgggccgggccgggccgggtgggcggggtttggaaaaacgaggaggaggaggagaaggcgggggggggggagacggggggaaagcaaggacacggcccggggggtgggagcgcgggccgggccgctcgtaagagccgcgacccggccgccggggagcgttgtcgccgtcggtctgccggcccccgtccctcccttttttgaccaaccagcgccccccccccctcaccaccattcctactaccaccaccaccaccaccaccgacacctcccgcgcacccccgcccacatccccccccaacccgcaccaccagcacgggttgggggtagcaggggatcaaaggggggcaaagccggcggggcggttcggggggggggggggggggcgggagaccaagtaggcccgcccatccgcggcccctcccggcagccacgcccccagcgtcgggtgtcacggggaaagagcagaggggagaggggagagggggggagaggggagagggggggagaggggagagggggggagaggggagagggggggagaggggagagggggggagaggggagagggggggagaggggagagggggggagaggggagagggggggagaggggagagggggggagaggggagagggggggagagggggtatataaaccaacgaaaagcgcgggaacggggatacggggcttgtgtggcacgacgtcgtggttgtgttactgggcaaacacttggggactgtaggtttctgtgggtgccgaccctaggcgctatggggattttgggttgggtcgggcttattgccgttggggttttgtgtgtgcgggggggcttgccttcaaccgaatatgttattcggagtcgggtggctcgagaggtgggggatatattaaaggtgccttgtgtgccgctcccgtctgacgatcttgattggcgttacgagaccccctcggctataaactatgctttgatagacggtatatttttgcgttatcactgtcccggattggacacggtcttgtgggataggcatgcccagaaggcatattgggttaacccctttttatttgtggcgggttttttggaggacttgagttaccccgcgtttcctgccaacacccaggaaacagaaacgcgcttggccctttataaagagatacgccaggcgctggacagtcgcaagcaggccgccagccacacacctgtgaaggctgggtgtgtgaactttgactattcgcgcacccgccgctgtgtagggcgacaggatttgggacctaccaacggaacgtctggacggaccccggttctgccgccggacgatgaagcgggcctgcagccgaagcccctcaccacgccgccgcccatcatcgccacgtcggaccccaccccgcgacgggacgccgccacaaaaagcagacgccgacgaccccactcccggcgcctctaacgatgcctcgacggaaacccgtccgggttcggggggcgaaccggccgcctgtcgctcgtcagggccggcgggcgctcctcgccgccctagaggctgtcccgctggtgtgacgttttcctcgtccgcgccccccgaccctcccatggatttaacaaacgggggggtgtcgcctgcggcgacctcggcgcctctggactggaccacgtttcggcgtgtgtttctgatcgacgacgcgtggcggcccctgatggagcctgagctggcgaaccccttaaccgcccacctcctggccgaatataatcgtcggtgccagaccgaagaggtgctgccgccgcgggaggatgtgttttcgtggactcgttattgcacccccgacgaggtgcgcgtggttatcatcggccaggacccatatcaccaccccggccaggcgcacggacttgcgtttagcgtgcgcgcgaacgtgccgcctcccccgagtcttcggaatgtcttggcggccgtcaagaactgttatcccgaggcacggatgagcggccacggttgcctggaaaagtgggcgcgggacggcgtcctgttactaaacacgaccctgaccgtcaagcgcggggcggcggcgtcccactctagaatcggttgggaccgcttcgtgggcggagttatccgccggttggccgcgcgccgccccggcctggtgtttatgctctggggcacacacgcccagaatgccatcaggccggaccctcgggtccattgcgtcctcaagttttcgcacccgtcgcccctctccaaggttccgttcggaacctgccagcatttcctcgtggcgaaccgatacctcgagacccggtcgatttcacccatcgactggtcggtttgaaaggcatcgacgtccggggtttttgtcggtgggggcttttgggtatttccgatgaataaagacggttaatggttaaacctctggtctcatacgggtcggtgatgtcgggcgtcgggggagagggagttccctctgcgcttgcgattctagcctcgtggggctggacgttcgacacgccaaaccacgagtcggggatatcgccagatacgactcccgcagattccattcggggtgccgctgtggcctcacctgaccaacctttacacgggggcccggaacgggaggccacagcgccgtctttctccccaacgcgcgcggatgacggcccgccctgtaccgacgggccctacgtgacgtttgataccctgtttatggtgtcgtcgatcgacgaattagggcgtcgccagctcacggacaccatccgcaaggacctgcggttgtcgctggccaagtttagcattgcgtgcaccaagacctcctcgttttcgggaaacgccccgcgccaccacagacgcggggcgttccagcgcggcacgcgggcgccgcgcagcaacaaaagcctccagatgtttgtgttgtgcaaacgcgcccacgccgctcgagtgcgagagcagcttcgggtcgttattcagtcccgcaagccgcgcaagtattacacgcgatcttcggacgggcggctctgccccgccgtccccgtgttcgtccacgagttcgtctcgtccgagccaatgcgcctccaccgagataacgtcatgctggcctcgggggccgagtaaccgccccccccccatgccaccctcactgcccgtcgcgcgtgtttgatgttaataaataacacataaatttggctggttgtttgttgtctttaatggaccgcccgcaagggggggggggcatttcagtgtcgggtgacgagcgcgatccggccgggatcctaggaccccaaaagtttgtctgcgtattccagggcggggctcagttgaatctcccgcagcacctctaccagcaggtccgcggtgggctggagaaactcggccgtcccggggcaggcggttgtcgggggtggaggcgcggcgcccaccccgtgtgccgcgcctggcgtctcctctgggggcgacccgtaaatggttgcagtgatgtaaatggtgtccgcggtccagaccacggtcaaaatgccggccgtggcgctccgggcgctttcgccgcgcgaggagctgacccaggagtcgaacggatacgcgtacatatgggcgtcccacccgcgttcgagcttctggttgctgtcccggcctataaagcggtaggcacaaaattcggcgcgacagtcgataatcaccaacagcccaatgggggtgtgctggataacaacgcctccgcgcggcaggcggtcctggcgctcccggccccgtaccatgatcgcgcgggtgccgtactcaaaaacatgcaccacctgcgcggcgtcgggcagtgcgctggtcagcgaggccctggcgtggcataggctatacgcgatggtcgtctgtggattggacatctcgcggtgggtagtgagtcccccgggccgggttcggtggaactgtaaggggacggcgggttaatagacaatgaccacgttcggatcgcgcagagccgatagtatgtgctcactaatgacgtcatcgcgctcgtggcgctcccggagcggatttaagttcatgcgaaggaattcggaggaggtggtgcgggacatggccacgtacgcgctgttgaggcgcaggttgccgggcgtaaagcagatggcgaccttgtccaggctaaggccctgggagcgcgtgatggtcatggcaagcttggagctgatgccgtagtcggcgtttatggccatggccagctccgtagagtcaatggactcgacaaactcgctgatgttggtgttgacgacggacatgaagccgtgttggtcccgcaagaccacgtaaggcaggggggcctcttccagtaactcggccacgttggccgtcgcgtgccgcctccgcagctcgtccgcaaaggcaaacacccgtgcgtacgtgtatcccatgagcgtataattgtccgtctgcagggcgacggacatcagccccccgcgcggcgagccggtcagcatctcgcagccccggaagataacgttgtccacgtacgtgctaaagggggcgacttcaaatgcctccccgaagagctcttggaggattcggaatctcccgaggaaggcccgcttcagcagcgcaaactgggtgtgaacggcggcggtggtctccggttccccgggggtgtagtggcagtaaaacacgtcgagctgttgttcgtccagccccgcgaaaataacgtcgaggtcgtcgtcgggaaaatcgtccgggcccccgtcccgcggccccagttgcttaaaatcaaacgcacgctcgccgggggcgcctgcgtcggccattaccgacgcctgcgtcggcacccccgaagatttggggcgcagagacagaatctccgccgttagttctcccatgcgggcgtaggcgagggtcctctgggtcgcatccaggcccgggcgctgcagaaagttgtaaaaggagataagcccgctaaatatgagccgcgacaggaacctgtaggcaaactccaccgaagtctccccctgagtctttacaaagctgtcgtcacgcaacactgcctcgaaggcccggaacgtcccactaaacccaaaaaccagttttcgcaggcgcgcggtcaccgcgatctggctgttgaggacgtaagtgacgtcgttgcgggccacgaccagctgctgtttgctgtgcacctcgcagcgcatgtgccccgcgtcctggtcctggctctgcgagtagttggtgatgcggctggcgttggccgtgagccacttttcaatcgtcaggccgggctggtgtgtcagccgtcggtattcgtcaaactccttgaccgacacgaacgtaagcacggggagggtgaacacgacgaactccccctcacgggtcaccttcaggtaggcgtggagcttggccatgtacgcgctcacctctttgtgggaggagaacagccgcgtccagccggggaggttggcggggttggtgatgtagttttccgggacgacgaagcgatccacgaactgcatgtgctcctcggtgatgggcaggccgtactccagcaccttcatgaggttaccgaactcgtgctcgacgcaccgtttgttgttaataaaaatggcccagctatacgagaggcgggcgtactcgcgcagcgtgcggttgcagatgaggtacgtgagcacgttctcgctctggcggacggaacaccgcagtttctggtgctcgaaggtcgactccagggacgccgtctgcgtcggcgagcccacacacaccaacacgggccgcaggcgggccgcgtactggggggtgtggtacagggcgttaatcatccaccagcaatacaccacggccgtgaggaggtgacgcccaaggagcccggcctcgtcgatgacgatcacgttgctgcgggtaaaggccggcagcgccccgtgggtggccggggccaaccgcgtcagggcgccctcggccaaccccagggtccgttccagggcggccagggcgcgaaactcgttccgcaactcctcgcccccggaggcggccagggcgcgcttcgtgaggtccaaaatcacctcccagtagtacgtcagatctcgtcgctgcaggtcctccagcgaggcggggttgctggtcagggtgtacgggtactgtcccagttgggcctggacgtgattcccgcgaaacccaaattcatgaaagatggtgttgatgggtcggctgagaaaggcgcccgagagtttggcgtacatgttttgggccgcaatgcgcgtggcgcccgtcaccacacagtccaagacctcgttgattgtctgcacgcacgtgctctttccggagccagcgttgccggtgataagatacaccgcgaacggaaactccctgaggggcaggcctgcgggggactctaaggccgccacgtcccggaaccactgcagatggggcacttgcgctccgtcgagctgttgttgcgagagctctcggatgcgcttaaggattggctgcaccccgtgcatagacgtaaaatttaaaaaggcctcggccctccctggaacggctggtcggtccccgggttgctgaaggtgcggcgggccgggtttctgtccgtctagctggcgctccccgccggccgccgccatgaccgcaccacgctcgcgggcccccactacgcgtgcgcggggggacacggaagcgctgtgctcccccgaggacggctgggtaaaggttcaccccacccccggtacgatgctgttccgcgagattctccacgggcagctggggtataccgagggccagggggtgtacaacgtcgtccggtccagcgaggcgaccacccggcagctgcaggcggcgatctttcacgcgctcctcaacgccaccacttaccgggacctcgaggcggactggctcggccacgtggcggcccgcggtctgcagccccaacggctggttcgccggtacaggaacgcccgggaggcggatatcgccggggtggccgagcgggtgttcgacacgtggcggaacacgcttaggacgacgctgctggactttgcccacgggttggtcgcctgctttgcgccgggcggcccgagcggcccgtcaagcttccccaaatatatcgactggctgacgtgcctggggctggtccccatattacgcaagcgacaagaagggggtgtgacgcagggtctgagggcgtttctcaagcagcacccgctgacccgccagctggccacggtcgcggaggccgcggagcgcgccggccccgggttttttgagctggcgctggccttcgactccacgcgcgtggcggactacgaccgcgtgtatatctactacaaccaccgccggggcgactggctcgtgcgagaccccatcagcgggcagcgcggagaatgtctggtgctgtggccccccttgtggaccggggaccgtctggtcttcgattcgcccgtccagcggctgtttcccgagatcgtcgcgtgtcactccctccgggaacacgcgcacgtctgccggctgcgcaataccgcgtccgtcaaggtgctgctggggcgcaagagcgacagcgagcgcggggtggccggtgccgcgcgggtcgttaacaaggtgttgggggaggacgacgagaccaaggccgggtcggccgcctcgcgcctcgtgcggcttatcatcaacatgaagggcatgcgccacgtaggcgacattaacgacaccgtgcgtgcctacctcgacgaggccggggggcacctgatagacgccccggccgtcgacggtaccctccctggattcggcaagggcggaaacagccgcgggtctgcgggccaggaccagggggggcgggcgccgcagcttcgccaggccttccgcacggccgtggttaacaacatcaacggcgtgttggagggctatataaataacctgtttggaaccatcgagcgcctgcgcgagaccaacgcgggcctggcgacccaattgcaggagcgcgaccgcgagctccggcgcgcaacagcgggggccctggagcgccagcagcgcgcggccgacctggcggccgagtccgtgaccggtggatgcggcagccgccctgcgggggcggacctgctccgggccgactatgacattatcgacgtcagcaagtccatggacgacgacacgtacgtcgccaacagctttcagcacccgtacatcccttcgtacgcccaggacctggagcgcctgtcgcgcctctgggagcacgagctggtgcgctgttttaaaattctgtgtcaccgcaacaaccagggccaagagacgtcgatctcgtactccagcggggcgatcgccgcattcgtcgccccctactttgagtcagtgcttcgggccccccgggtaggcgcgcccatcacgggctccgatgtcatcctgggggaggaggagttatgggatgcggtgtttaagaaaacccgcctgcaaacgtacctgacagacatcgcggccctgttcgtcgcggacgtccagcacgcagcgctgcccccgcccccctccccggtcggcgccgatttccggcccggcgcgtccccgcggggccggtccagatcgcggtcgcccggaagaactgcgcgaggcgcgccggaccagggcgggggcatcgggcaccgggatggccgccgcgacggccgacgatgaggggtcggccgccaccatcctcaagcaggccatcgccggggaccgcagcctggtcgaggcggccgaggcgattagccagcagacgctgctccgcctggcctgcgaggtgcgccaggtcggcgaccgccagccgcggtttaccgccaccagcatcgcgcgcgtcgacgtcgcgcctgggtgccggttgcggttcgttctggacgggagtcccgaggacgcctatgtgacgtcggaggattactttaagcgctgctgcggccagtccagttatcgcggcttcgcggtggcggtcctgacggccaacgaggaccacgtgcacagcctggccgtgccccccctcgttctgctgcaccggttctccctgttcaaccccagggacctcctggactttgagcttgcctgtctgctgatgtacctggagaactgcccccgaagccacgccaccccgtcgacctttgccaaggttctggcgtggctcggggtcgcgggtcgccgcacgtccccattcgaacgcgttcgctgccttttcctccgcagttgccactgggtcctaaacacactcatgttcatggtgcacgtaaaaccgttcgacgacgagttcgtcctgccccactggtacatggcccggtacctgctggccaacaacccgccccccgttctctcggccctgttctgtgccaccccgacgagctcctcattccggctgccggggccgcccccccgctccgactgcgtggcctataaccccgccgggatcatggggagctgctgggcgtcggaggaggtgcgcgcgcctctggtctattggtggctttcggagaccccaaaacgacagacgtcgtcgctgttttatcagttttgttgaattttaggaaataaacccggttttgtttctgtggcctcccgacggatgcgcgtgtccttactccgtcttggtgggtgggtggctgtgtatggcgtcccatctgtgcggggaggggggcaagtcggcacgtattcggacagactcaagcacacacgggggagcgctcttgtctcagggcaatgtttttattggtcaaactcaggcaaacagaaacgacatcttgtcgtcaaagggatacacaaacttccccccctcgccccatactcccgccagcaccccggtaaacaccaactcaatctcgcgcaggatttcgcgcaggtgatgagcgcagtccacgggggggagcacaaggggccgcgggtatagatcgacggggacgccgaccgactccccgcctccgggacagacacgcacgacgcgccgccagtagtgctctgcgtccagcaaggcgccgccgcggaaggcagtggggggcaaggggtcgctggcctcaaagggggacacccgaacgctccagtactccgcgtccaaccgtttattaaacgcgtccaagataaggcggtcgcaggcgtcctccataaggccccgggccgtgagtgcgtcctcctccggcacgcatgccgttgtcaggcccaggacccgtcgcagcgtgtcgcgtacgacccctgccgccgtggtgtacgcgggcccgcggagaggaaatcccccaagatggtcagtgttgtcgcgggagttccagaaccacactcccgcctggctccaggcgactgcgtgggtgtagacgccctcgagggccaggcacagtgggtgccgcagccggaggccgttggccctaagcacggctcccacggccgtctcgatggcccgccgggcgtcctcgatcaccccggaagccgcatccgcgtcttgggggtccacgttaaagacaccccagaacgcacccccatcgcccccgcagaccgcgaacttcaccgagctggccgtctcctcgatctgcaggcagacggcggccattaccccacccaggagctgccgcagcgcagggcaggcgttgcacgtgtccgggaccaggcgctccaagacggccccggcccagggctctgagggagcggccaccaccagcgcgtccagtcttgctaggcccgtccggccgtgggggtccgccagcccgctccccccgaggtcggccagggccgccaggagctgggcgcgaagtccggggaagcaaaaccgcgccgtccagacgggcccgacggccgcgggcgggtctaacagttggatgattttagtggcgggatgccaccgcgccaccgcctcccgcaccgcgggcaggaggcatccggctgccgccgaggccacgccgggccaggctcgcggggggaggacgaccctggcccccaccgcgggccaggcccccaggagcgcggcgtaagcggccgcggccccgcgcaccaggtcccgtgccgactcggccgtggccggcacggtgaacgtgggccaacccggaaaccccaggacggcaaagtacgggacgggtcccccccggacctcaaactcgggccccagaaaggcaaagacgggggccagggccccgggggcggcgtggaccgtggtatgccactgccggaaaagggcgacgagcgccggcgcggagaacttctcgccggcgcttacaaagtagtcgtaatcgcggggcagcagcacccgtgccgtgactcgttgcgggtgcccgcgtggccgcaggcccacctcgcacacctcgaccaggtccccgaacgcgccctccttcttgatcggcggaaacgcaagagtctggtattcgcgcgcaaatagcgcggttccggtggtgatgttaacggtcagcgaagcggcggacgcgcactggggggtgtcgcgaatggccgccaggcgcgcccacgccagccgcgcgtcgggatgctcggcaacgcgcgccgccagggccatagggtcgatgtcaatgttggcctccgcgaccaggagagcggcgcgaggggcggcgggcgggccccacgacgctctctcaactttcaccaccagtcccgtgcgtgggtccgagccgatacgcagcggggcgaacagggccaccggcccggtctggcgctccagggccgccaggacgcacgcgtacagcgcccgccacagagtcgggttctccaggggctccagcggggaggcggccggcgtcgtcgcggcgcgggcggccgccacgacggcctggacggagacgtccgcggagccgtagaaatcccgcagctccgtcgcggtgacggagacctccgcaaagcgcgcgcgaccctcccctgcggcgttgcgacatacaaaatacaccagggcgtggaagtactcgcgagcgcgggggggcagccataccgcgtaaagggtaatggcgctgacgctctcctccacccacacgatatctgcggtgtccatcgcacggcccctaaggatcacgggcggtctgtgggtcccatgctgccgtgcctggccgggcccggtgggtcgcggaaaccggtgacggggggggggcggtttttggggttggggtgggggtgggaaacggcccgggtccgggggccaacttggcccctcggtgcgttccggcaacagcgccgccggtccgcggacgaccacgtaccgaacgagtgcggtcccgagacttatagggtgctaaagttcaccgccccctgcatcatgggccaggcctcggtggggagctccgacagcgccgcctccaggatgatgtcagcgttggggttggcgctggatgagtgcgtgcgcaaacagcgcccccacgcgggcacgcgtagcttgaagcgcgcgcccgcaaactcccgcttgtgggccataagcagggcgtacagctgcctgtgggtccggcaggcgctgtggtcgatgtggtgggcgtccaacaaccccacgattgtctgtttggtgaggtttttaacgcgccccgccccgggaaacgtctgcgtgcttttggccatctgcacgccaaacagttcgccccagattatcttgaacagcgccaccgcgtggtccgtctcgctaacggacccgcgcgggggacagccgcttagggcgtcggcgacgcgcttgacggcttcctccgagagcagaagtccgtcggttacgttacagtggcccagttcgaacaccagctgcatgtagcggtcgtagtggggggtcagtaggtccagcacgtcatcggggccgaaggtcctcccagatcccccggccgccgagtcccaatgcaggcgcgcggccatggtgctgcacaggcacaacagctcccagacgggggttacgttcagggtggggggcagggccacgagctccagctctccggtgacgttgatcgtggggatgacgcccgtggcgtagtggtcatagatccgccgaaatatggcgctgctgcgggtggccatgggaacgcggagacaggcctccagcaacgccaggtaaataaaccgcgtgcgtcccatcaggctgttgaggttgcgcatgagcgcgacaatttccgccggcgcgacatcggaccggaggtatttttcgacgaaaagacccacctcctccgtctcggcggcctgggccggcagcgacgcctcgggatcccggcaccgcagctcccgtagatcgcgctgggccctgagggcgtcgaaatgtacgccccgcaaaaacagacagaagtcctttggggtcagggtatcgtcgtgtccccagaagcgcacgcgtatgcagtttagggtcagcagcatgtgaaggatgttaaggctgtccgagagacacgccagcgtgcatctctcaaagtagtgtttgtaacggaatttgttgtagatgcgcgacccccgccccagcgacgtgtcgcatgccgacgcgtcacagcgccccttgaaccggcgacacagcaggtttgtgacctgggagaactgcgcgggccactggccgcaggaactgaccacgtgattaaggagcatgggcgtaaagacgggctccgagcgcgccccggagccgtccatgtaaatcagtagctcccccttgcggagggtgcgcacccgtcccagggactggtacacggacaccatgtccggtccgtagttcatgggtttcacgtaggcgaacatgccatcaaagtgcaggggatcgaagctgaggcccacggttacgaccgtcgtgtatataaccacgcggtattggccccacgtggtcacgtccccgaggggggtgagcgagtgaagcaacagcacgcggtccgtaaactgacggcagaaccgggccacgatctccgcgaaggagaccgtcgacgaaaaaatgcagatgttatcgcccccgccaaggcgcgcttccagctccccaaagaacgtggccccccgggcgtccggagaggcgtccggagacgggccgctcggcggcccgggcgggcgcagggcagcctgcaggagctcggtccccagacgcgggagaaacaggcaccggcgcgccgaaaacccgggcatggcgtactcgccgaccaccacatgcacgtttttttcgccccggagaccgcacaggaagtccaccaactgcgcgttggcggttgcgtccatggcgatgatccgaggacaggtgcgcagcaggcgtagcattaacgcatccacgcggcccagttgctgcatcgttggcgaatagagctggcccagcgtcgacataacctcgtccagaacgaggacgtcgtagttgttcagaaggttggggcccacgcgatgaaggctttccacctggacgataagtcggtggaaggggcggtcgttcataatgtaattggtggatgagaagtaggtgacaaagtcgaccaggcctgactcagcgaaccgcgtcgctagggtctgggtaaaactccgacgacaggagacgacgagcacactcgtgtccggagagtggatcgcttcccgcagccagcggatcagcgcggtagtttttcccgaccccattggcgcgcggaccacagtcacgcacctggccgtcggggcgctcgcgttggggaaggtgacgggtccgtgctgctgccgctcgatcgttgttttcgggtgaacccggggcacccattcggccaaatcccccccgtacaacatccgcgctagcgatacgctcgacgtgtactgttcgcactcgtcgtccccaatgggacgcccggcccccagaggatctcccgactccgcgccccccacgaaaggcatgaccggggcgcggacggcgtggtgggtctggtgtgtgcaggtggcgacgtttgtggtctctgcggtctgcgtcacggggctcctcgtcctggcctctgtgttccgggcacggtttccctgcttttacgccacggcgagctcttatgccggggtgaactccacggccgaggtgcgcgggggtgtagccgtgcccctcaggttggacacgcagagccttgtgggcacttatgtaatcacggccgtgttgttgttggccgtggccgtgtatgccgtggtcggcgccgtgacctcccgctacgaccgcgccctggacgcgggccgccgtctggctgcggcccgcatggccatgccgcacgccacgctgatcgccggaaacgtctgctcttggttgctgcagatcaccgtcctgttgctggcccatcgcatcagccagctggcccacctggtttacgtcctgcactttgcgtgtctggtgtattttgcggcccatttttgcaccaggggggtcctgagcgggacgtatctgcgtcaggtgcacggcctgatggagctggccccgacccatcatcgcgtcgtcggcccggctcgcgccgtgctgacaaacgccttgctgttgggcgtcttcctgtgcacggccgacgccgcggtatccctgaataccatcgccgcgttcaactttaatttttcggccccgggcatgctcatctgcctgaccgtgctgttcgccattctcgtcgtatcgctgttgttggtggtcgagggggtgttgtgtcactacgtgcgcgtgttggtgggcccccacctgggggccgtggccgccacgggcatcgtcggcctggcctgcgagcactattacaccaacggctactacgttgtggagacgcagtggccgggggctcagacgggagtccgcgtcgccctcgccctggtcgccgcctttgccctcggcatggccgtgctccgctgcacccgcgcctatctgtatcacaggcggcaccacaccaaattttttatgcgcatgcgcgacacgcgacaccgcgcacattccgccctcaagcgcgtacgcagttccatgcgcggatcgcgagacggccgccacaggcccgcacccggcagcccgcccgggattcccgaatatgcggaagacccctacgcgatctcatacggcggccagctcgaccggtacggagattccgacggggagccgatttacgacgaggtggcggacgaccaaaccgacgtattgtacgccaagatacaacacccgcggcacctgcccgacgacgatcccatctatgacaccgttggggggtacgaccccgagcccgccgaggaccccgtgtacagcaccgtccgccgttggtagctgtttggttccgttttaataaaccgtttgtgtttaacccgaccgtggtgtatgtctggtgtgtggcgtccgatcccgttactatcaccgtccccccccccccctcaaccccggcgattgtgggttttttaaaaacgacacgcgtgcgaccgtatacagaacattgttttggtttttattcgctatcggacatggggggtggaaactgggtggcggggcaggcgcctccgggggtccgccggtgagtgtggcgcgagggggggtccgatgaacgcaggcgctgtctccccggggcccgcgtaaccccgcgcatatccgggggcacgtagaaattaccttcctcttcggactcgatatccacgacgtcaaagtcgtgggcggtcagcgagacgacctccccgtcgtcggtgatgaggacgttgtttcggcagcagcagggccgggccccggagaacgagaggcccatagctcggcgagcgtgtcgtcgaatgccaggcggctgcttcgctggatggccttatagatctccggatcgatgcggacgggggtaatgatcagggcgatcggaacggcctggttcgggagaatggacgccttgctgggtcctgcggccccgagagccccggcgccgtcctccaggcggaacgttacgccctcctccgcgctggtgcggtgcctgccgataaacgtcaccagatgcgggtggggggggcagtcggggaagtggctgtcgagcacgtagccctgcaccaagatctgcttaaagttcgggtgacgggggttcgcgaagacgggctcgcggcggaccagatccccggagctccaggacacgggggagatggtgtggcgtccgaggtcgggggcgccaaacagaagcacctccgagacaacgccgctatttaactccaccaaggcccgatccgcggcggagcaccgccttttttcgcccgaggcgtgggcctctgaccaggcctggtcttgcgtgacgagagcctcctccgggccggggacgcgcccgggcgcgaagtatcgcacgctgggcttcgggatcgaccggataaatgcccggaacgcctccggggaccggtgtgccatcaagtcctcgtacgcggaggccgtggggtcgctggggtccatggggtcgaaagcgtacttggcccggcatttgacctcgtaaaaggccaggggggtcttggggactggggccaggtagccgtgaatgtcccgaggacagacgagaatatccagggacgccccgaccatccccgtgtgaccgtccatgaggaccccacacgtatgcacgttctcttcggcgaggtcgctgggttcgtggaagataaagcgccgcgtgtcggcgccggcctcgccgccgtcgtccgcgcggcccacgcagtagcgaaacagcaggcttcgggccgtcggctcgttcacccgcccgaacatcaccgccgaagactgtacatccggccgcaggctggcgttgtgcttcagccactggggcgagaaacacggaccctgggggccccagcggagggtggatgcggtcgtgaggccccgccggagcagggcccatagctggcagtcggcctggttttgcgtggccgcctcgtaaaaccccatgaggggccggggcgccacggcgtccgcggcggccgggggcccgcggcgcgtcaggcgccataggtgccgaccgagtccgcggtccaccatacccgcctcctcgaggaccacggccagggaacacagataatccaggcgggcccagaggggaccgatggccagaggggcgcggacgccgcgcagcaacccgcgcaggtggcgctcgaacgtctcggctagtatatgggagggcagcgcgttggggatcaccgacgccgaccacatagagtcaaggtccggggagtcgggatcggcgtccgggtcgcgggcgtgggtgcccccaggagatagcggaatgtctggggtcggaggccctgaggcgtcagaaagtgccggcgacgcggcccggggcttttcgtctgcggtgtcggtggcgtgctgatcacgtggggggttaacgggcgaatgggagctcgggtccacagctgacgtcgtctggggtggggggggcaggggacggaaggtggttgtcagcggaagactgttagggcgggggcgcttgggggggctgtcggggccacgaggggtgtcctcggccagggcccagggacgcttagtcacggtgcgtcccggcggacatgctgggcctaccgtggactccatttccgagacgacgtggggggagcggtggttgagcgcgccgccgggtgaacgctgattctcacgacagcgcgtgccgcgcgcacgggttggtgtgacacaggcgggacaccagcaccaggagaggcttaagctcgggaggcagcgccaccgacgacagtatcgccttgtgtgtgtgctggtaatttatacaccgatccgtaaacgcgcgccgaatcttgggattgcggaggtggcgccggatgccctctgggacgtcatacgccaggccgtgggtgttggtctcggccgagttgacaaacagggctgggtgcagcacgcagcgataggcgagcagggccagggcgaagtccggcgacagctggttgttaaaatactggtaaccgggaaaccgggtcacgggtacgcccaggctcggggcgacgtacacgctaaccaccaactccagcagcgtctggcccagggcgtacaggtcaaccgctaacccgacgtcgtgcttcaggcggtggttggtaaattcggcccgttcgttgttaaggtatttcaccaacagctccgggggctggttatacccgtgacccaccagggtgtgaaagttggctgtggttagggcggtgggcatgccaaacatccggggggacttgaggtccggctcctggaggcaaaactgcccccgggcgatcgtggagttggagttgagggtgacgaggctaaagtcggcgaggacggcccgccggagcgagacggcgtccgaccgcagcatgacgaggatgttggcgcacttgatatccaggtggctgatcccgcaggtggtgtttaaaaacacaacggcgcgggccagctccgtgaagcactggtggagggccgtcgagaccgaggggtttgttgtgcgcagggacgccagttggccgatatacttaccgaggtccatgtcgtacgcggggaacactatctgtcgttgttgcagcgagaacccgaggggcgcgatgaagccgcggatgttgtgggtgcggccggcgcgtagaacgcactccccgaccaacagggtcgcgatgagctcaacggcaaaccactccttttcctttatggtcttaacggcaagcttatgttcgcgaatcagttggacgtcaccgtatcccccagaccccccgaagcttcgggccccggggatctcgagggtcgtgtagtgtagggcggggttgatggcgaacacggggctgcatagcttgcggatgcgcgtgagggtgaggatgtgcgagggggacgaggggggtgcggttaacgccgcctgggatctgcgcaggggcgggcggttcagtttggccgccgtaccgggcgtctcgggggacgcgcggcgatgagacgagcggctcattcgccatcgggatagtcccgcgcgaagccgctcgcggaggccggatcggtggcgggacccgtgggaggagcgggagacggcggcgtcctggagagaggggccgctggggcgcccggaggccccgtgggggttggagtgtacgtaggatgcgagccaatccttgaaggaccgttggcgtgcaccttgggggctgaggttagctgccacatgaccagcaggtcgctgtctgcgggactcatccatccttcggccaggtcgccgtctccccacagagaagcgttggtcgctgcttcctcgagttgctcctcctggtccgcaagacgatcgtccacggcgtccaggcgctcaccaagcgccggatcgaggtaccgtcggtgtgcggttagaaagtcacgacgcgccgcttgctcctccacgcgaattttaacacaggtcgcgcgctgtcgcatcatctctaagcgcgcgcgggactttagccgcgcctccaattccaagtgggccgcctttgcagccataaaggcgccaacaaaccgaggatcttgggtgctgacgccctcccggtgcagctgcagggtctggtccttgtaaatctcggctcggaggtgcgtctcggccaggcgtcggcgcagggccgcgtgggcggcatctcggtccattccgccaccctgcgggcgacccggggggtgctctgatagtctcgcgtgcccaaggcccgtgatcggggtacttcgccgccgcgacccgccacccggtgtgcgcgatgtttggtcagcagctggcgtccgacgtccagcagtacctggagcgcctcgagaaacagaggcaacttaaggtgggcgcggacgaggcgtcggcgggcctcaccatgggcggcgatgccctacgagtgccctttttagatttcgcgaccgcgacccccaagcgccaccagaccgtggtccctggcgtcgggacgctccacgactgctgcgagcactcgccgctcttctcggccgtggcgcggcggctgctgtttaatagcctggtgccggcgcaactaaaggggcgtgatttcgggggcgaccacacggccaagctggaattcctggcccccgagttggtacgggcggtggcgcgactgcggtttaaggagtgcgcgccggcggacgtggtgcctcagcgtaacgcctactatagcgttctgaatacgtttcaggccctccaccgctccgaagcctttcgccagctggtgcactttgtgcgggactttgcccagctgctcaaaacctccttccgggcctccagcctcacggagaccacgggcccccccaaaaaacgggccaaggtggacgtggccacccacggccggacgtacggcacgctggagctgttccaaaaaatgatccttatgcacgccacctactttctggccgccgtgctcctcggggaccacgcggagcaggtcaacacgttcctgcgtctcgtgtttgagatccccctgtttagcgacgcggccgtgcgccacttccgccagcgcgccaccgtgtttctcgtcccccggcgccacggcaagacctggtttctggtgcccctcatcgcgctgtcgctggcctcctttcgggggatcaagatcggctacacggcgcacatccgcaaggcgaccgagccggtgtttgaggagatcgacgcctgcctgcggggctggttcggttcggcccgagtggaccacgttaaaggggaaaccatctccttctcgtttccggacgggtcgcgcagtaccatcgtgtttgcctccagccacaacacaaacgtaagtcctcttttctttcgcatggctctcccaaggggccccgggtcgacccgacccacacccacccacccacatacacacacaaccagacgcgggaggaaagtctgccccgtgggcactgatttttattcgggatcgcttgaggaggcccgggcaacggcccgggcaacggtggggcaactcgtagcaaataggcgactgatgtacgaagagaagacacacaggcgccacccggcgctggtcggggggatgttgtccgcgccgcaccgtcccccgacgacctcttgcagacggtccgtgatgcaaggacggcggggggcctgcagcagggtgaccgtatccacgggatggccaaagagaagcggacacaggctagcatccccctggaccgccagggtacactgggccatcttggcccacagacacggggcgacgcagggacaggactccgttacgacggaggagagccacagtgcgttggcggaatcgatgtggggcggcggggcgcaggactcgcagccccccgggtggttggtgatcctggccaggagccatcccagatggcgggccctgcttcccggtggacagagcgaccccaggtcgctgtccatggcccagcagtagatctggccgctggggaggtgccaccaggcccccgggcccaaggcgcagcacgcgcccggctccgggggggtcttcgcggggaccagatacgcgccatccagctcgccgaccactggctcctccgcgagctgttcggtggttgggtcgggggtttcctccgggggggtggccgcccgtatgcgtgcgaacgtgagggtgcacaggagcggggtcagggggtgcgtcacgctccggaggtggacgatcgcgcagtagcggcgctcgcggttaaagaaaaagagggcaaagaaggtgttcgggggcaaccgcagcgccttggggcgcgtcagatacagaaaaatctcgcagaagagggcgcgcccggggtctgggttaggaagggccacctgacacagaggctcggtgaggaccgttagacaccgaaagatcttgagccgctcgtccgcccgaacgacgcgccacacaaagacggagttgacaatgcgcgcgatagagtcgacgtccgtccccaggtcgtcgactctatcgcgcgtgccgcgagctccggcccgggaatccggccggggcaaggtccccgggggaccaggcggcgccaggggccgccggggtcccagctgcgccatgccgggggcggggggagggcaaaccccagaggcgggggccaacggcgcggggaggagtgggtgggcgaggtggccgggggaaggcgcccgctagcgagaccggccgttcccggacgacaccttgcgacaaaacctaaggacagcggcccgcgcgacggggtccgagaggctaaggtaggccgcgatgttaatggtgaacgcaaagccgccgggaaagacaactatgccacagaggcggcgattaaaccccaggcagaggtaggcgtagctttccccgggcaggtattgctcgcagaccctgcgtggggctgtggaggggacggcctccatgaagcgacatttactctgctcgcgtttactgacgtcaccatccatcgccacggcgattggacgattgttaagccgcagcgtgtctccgcttgtgctgtagtagtcaaaaacgtaatggccgtcggagtcggcaaagcgggccgggaggtcgtcgccgagcgggacgacccgccgcccccgaccgccccgtccccccaggtgtgccaggacggccagggcatacgcggtgtgaaaaaaggcgtcgggggcggtcccctcgacggcgcgcatcaggttctcgaggagaatggggaagcgcctggtcacctcccccaaccacgcgcgttggtcggggccaaagtcatagcgcaggcgctgtgagattcgcgggccgccctgaagcgcggcccggatggcctggcccagggcccggaggcacgccagatgtatgcgcgcggtaaaggcgacctcggcggcgatgtcaaagggcggcaggacggggcgcgggtggcgcaggggcacctcgagcgcgggaaagcgtagcagcagctccgcctgcccagcgggagacagctggtgggggcgcacgacgcgttctgcggcgcaggcctcggtcagggccgtggccagcgccgaggacagcagcggagggcgggcgcgtcgcccgccccacgccacggagttctcgtaggagacgacgacgaagcgctgcttggttccgtagtggtggcgcaggaccacggagatagaacgacggctccacagccagtccggccggtcgccgccggccagggcttcccatccgcgatccaaccactcgaccagcgaccgcggctttgcggtaccaggggtaagggttagaacgtcgttcaggatgtcctcgcccccgggcccgtggggcgctggggccacaaagcggcccccgccggggggctccagacccgccagcaccgcatctgcgtcagccgcccccatggcgcccccgctgacggcctggtgaaccagggcgccctggcgtagccccgatgcaacgccacaggccgcacgcccggtccgcgctcggaccgggtggcggcgggtgacgtcctgcactgcccgctgaaccaacgcgaggatctcctcgttctcctgtgcgatggacacgtcctgggccgcggtcgtgtcgccgccgggggccgtcagctgctcctccggggagatgggggggtcggacgccccgacgatgggcgggtctgcgggcgcccccgcgtggggccgggccaagggctgcggacgcggggacgcgctttcccccagacccatggacaggtgggccgcagcctccttcgcggccggcggggcggcggcgccaagcagagcgacgtagcggcacaaatgccgacagacgcgcatgatgcgcgtgctgtcggccgcgtagcgcgtgttgggggggacgagctcgtcgtaactaaacagaatcacgcgggcacagctcgcccccgagccccacgcaaggcgcagcgccgccacggcgtacgggtcatagacgccctgcgcgtcacacaccacgggcagggagacgaacaaccccccggcgctggacgcacgcggaaggaggccagggtgtgccggcacgacgggggccagaagctcccccaccgcatccgcgggcacgtaggcggcaaacgccgtgcaccacggggtacagtcgccggtggcatgagcccgagtctggatttcgacctggaagtttgcggccgtcccgagtccggggcggccgcgcatcagggcggccagagggattcccgcggccgccaggcactcgctggatatgatgacgtgaaccaaagacgagggccgacccgggccgtggccgagatcgtactggacctcgttggccaagtgcgcgttcatggttcgggggtgggtgtgggtgtgtaggcgatgcgggtcccccgagtccgcgggaagggcgtgggtttggcgcgcgtatgcgtattcgccaacggaggcgtgcgtgcttatgcgcggcgcgtttcttctgtctctagggaatccgaggccaggactttaacctgctctttgtcgacgaggccaactttattcgcccggatgcggtccagacgattatgggctttctcaaccaggccaactgcaagattatcttcgtgtcgtccaccaacaccgggaaggccagtacgagctttttgtacaacctccgcggggccgcagacgagcttctcaacgtggtgacctatatatgcgatgatcacatgccgagggtggtgacgcacacaaacgccacggcctgttcttgttatatcctcaacaagcccgttttcatcacgatggacggggcggttcgccggaccgccgatttgtttctggccgattccttcatgcaggagatcatcgggggccaggccagggagaccggcgacgaccggcccgttctgaccaagtctgcgggggagcggtttctgttgtaccgcccctcgaccaccaccaacagcggcctcatggcccccgatttgtacgtgtacgtggatcccgcgttcacggccaacacccgagcctccgggaccggcgtcgctgtcgtcgggcggtaccgcgacgattatatcatcttcgccctggagcacttttttctccgcgcgctcacgggctcggcccccgccgacatcgcccgctgcgtcgtccacagtctgacgcaggtcctggccctgcatcccggggcgtttcgcggcgtccgggtggcggtcgagggaaatagcagccaggactcggccgtcgccatcgccacgcacgtgcacacagagatgcaccgcctactggcctcggagggggccgacgcgggctcgggccccgagcttctcttctaccactgcgagcctcccgggagcgcggtgctgtacccctttttcctgctcaacaaacagaagacgcccgcctttgaacactttattaaaaagtttaactccgggggcgtcatggcctcccaggagatcgtttccgcgacggtgcgcctgcagaccgacccggtcgagtatctgctcgagcagctaaataacctcaccgaaaccgtctcccccaacactgacgtccgtacgtattccggaaaacggaacggcgcctcggatgaccttatggtcgccgtcattatggccatctacctcgcggcccaggccggacctccgcacacattcgctcctatcacacgcgtctcgtgagcgcccaataaacacacccaggtatgctacgcacgaccacggtgtcgtctgttaaggggggggggggaagggggtgttggcgggaagcgtgggaacacgggggattctctcacgaccggcaccagtaccacccccctgtgaacacagaaaccccaacccaaatcccataaacatacgacacacaggcatattttggaatttcttaggtttttatttatttaggtatgctggggtttctccctggatgcccacccccacccccccgtgggtctagccgggccttagggatagcgtataacgggggccatgtctccggaccgcacaacggccgcgccgtcaaaggtgcacacccgaaccacgggagccagggccaaggtgtctcctagttggcccgcgtgggtcagccaggcgacgagcgcctcgtaaagcggcagccttcgctctccatcctgcatcagggccggggcttcggggtgaatgagctgggcggcctcccgcgtgacactctgcatctgcagtagagcgttcacgtacccgtcctgggcacttagcgcaaagagccgggggattagcgtaaggatgatggtggttccctccgtgatcgagtaaaccatgttaaggaccagcgatcgcagctcggcgtttacgggaccgagttgttggacgtccgccagcagcgagaggcgactcccgttgtagtacagcacgttgaggtctggcagccctccggggtttctggggctggggttcaggtcccggatgcccctggccacgagccgcgccacgatttcgcgcgccaggggcgatggaagcggaacgggaaaccgcaacgtgaggtccagcgaatccaggcgcacgtccgtcgcttggccctcgaacacgggcgggacgaggctgatggggtccccgttacagagatctacgggggaggtgttgcgaaggttaacggtgccggcgtgggtgaggcccacgtccagggggcaggcgacgattcgcgtgggaagcacccgggtgatgaccgcggggaagcgccttcggtacgccagcaacaaccccaacgtgtcgggactgacgcctccggagacgaaggattcgtgcgccacgtcggccagcgtcagttgccggcggatggtcggcaggaataccacccgcccttcgcagcgctgcagcgccgccgcatcggggcgcgagatgcccgagggtatcgcgatgtcagtttcaaagccgtccgccagcatggcgccgatccacgcggcagggagtgcagtggtggttcgggtggcgggaggagcgcggtgggggtcagcggcgtagcagagacgggcgaccaacctcgcataggacggggggtgggtcttagggggttgggaggcgacagggaccccagagcatgcgcggggaggtctgtcgggcccagacgcaccgagagcgaatccgtccgcggagtcccggcttgggttttatggggcccggccctcggaatcgcggcttgtcggcggggacaaagggggcggggctaggggcttgcggaaacagaagacgcgtgggataaaagaatcgcactaccccaaggaagggcggggcggtttattacagagccagtcccttgagcggggatgcgtcatagacgagatactgcgcgaagtgggtctcccgcgcgtgggcttccccgttgcgggcactgcggaggagggcggggtcgctggcgcaggtgagcgggtaggcctcctgaaacaggccacacgggtcctccacgagttcgcggcaccccggggggcgcttaaactgtacgtcgctggcggcggtggccgtggacaccgccgaacccgtctccacgatcaggcgctccaggcagcgatgtttggcggcgatgtcggccgacgtaaagaacttaaagcaggggctgagcaccggcgaggccccgttgaggtggtaggccccgttatagagcaggtccccgtacgaaaatcgctgcgacgcccacgggttggccgtggccgcgaaggcccgggacgggtcgctctggccgtggtcgtacatgagggcggtgacatccccctccttgtcccccgcgtaaacgcccccggcggcgcgtccccgggggttgcagggccggcggaagtagttgacgtcggtcgacacgggggtggcgataaactcacacacggcgtcctggccgtggtccatccctgcgcgccgcggcacctgggcgcacccgaacacggggacgggctgggccggccccaggcggtttcccgccacgaccgcgttccgcaggtacacggctgccgcgttgtccaggagagggggagccccgcggcccaggtaaaagttttggggaaggttgcccatgtcggtgacggggttgcggacggttgccgtggccacgacggcggtgtagcccacgcccaggtccacgttcccgcgcggctgggtgagcgtgaagtttacccccccgccagtttcgtgccgggccacctggagctggcccaggaagtacgcctccgacgcgcgctccgagaacagcacgttctcagtcacaaagcggtcctgtcggacgacggtgaacccaaacccgggatggaggcccgtcttgagctgatgatgcaaggccacgggactgatcttgaagtaccccgccatgagcgcgtaggtcagcgcgttctccccggccgcgctctcgcggacgtgctgcacgacgggctgtcggatcgacgaaaagtagttggcccccagagccggggggaccagggggacctgccgcgacaggtcgcgcagggccggggggaaattgggcgcgttcgccacgtggtcggccccggcgaacagcgcgtggacggggagggggtaaaaatagtcgccattttggatggtatggtccagatgctggggggccatcagcaggattccggcgtgcaacgccccgtcgaatatgcgcatgttggtggtggacgcggtgttggcgcccgcgtcgggcgccgccgagcagagcagcgccgttgtgcgttcggccatgttgtgggccagcacctgcagcgtgagcatggcgggcccgtccactaccacgcgcccgttgtgaaacatggcgttgaccgtgttggccaccagattggccgggtgcagggggtgcgcggggtccgtcacggggtcgctggggcactcctcgccgggggcgatctccgggaccaccatgttctgcagggtggcgtatacgcggtcgaagcgaacccccgcggtgcagcagcggccccgcgagaaggcgggcaccatcacgtagtagtaaatcttgtggtgcacggtccagtccgccccccggtgcggccggtcatccgcggcgtccgcggctcgggcctgggtgttgtgcagcagctggccgtcgttgcggttgaagtccgcggtcgccacgttacatgccgccgcgtacacggggtcgtggccccccgcgctaacccggcagtcgcgatggcggtccagggccgcgcgccgcatcagggcgtcacagtcccacacgaggggtggcagcagcgccgggtctcgcattaggtgattcagctcggcttgcgcctgcccgcccagctccgggccggtcagggtaaagtcatcaaccagctgggccagggcctcgacgtgcgccaccaggtcccggtacacggccatgcactcctcgggaaggtctcccccgaggtaggtcacgacgtacgagaccagcgagtagtcgttcacgaacgccgcgcaccgcgtgttgttccagtagctggtgatgcactggaccacgagccgggccagggcgcagaagacgtgctcgctgccgtgtatggcggcctgcagcaggtaaaacaccgccgggtagttgcggtcgtcgaacgccccgcgaacggcggcgatggtggcgggggccatggcgtggcgtcccacccccagctccaggccccgggcgtcccggaacgccgccggacatagcgccaggggcaagttgccgttcaccacgcgccaggtggcctggatctcccccgggccggccgggggaacgtccccccccggcagctccacgtcggccacccccacaaagaagtcgaacgcggggtgcagctcaagagccaggttggcgttgtcgggctgcataaactgctccggggtcatctggccttccgcgacccatcggacccgcccgtgggccaggcgctgcccccaggcgttcaaaaacagctgctgcatgtctgcggcggggccggccggggccgccacgtacgccccgtacggattggcggcttcgacggggtcgcggttaaggcccccgaccgccgcgtcaacgttcatcagcgaagggtggcacacggtcccgatcgcgtgttccagagacaggcgcagcacctggcggtccttcccccaaaaaaacagctggcggggcgggaaggcgcggggatccgggtggccgggggcggggactaggtccccggcgtgcgcggcaaaccgttccatgaccggattgaacaggcccaggggcaggacgaacgtcaggtccatggcgcccaccagggggtagggaacgttggtggcggcgtagatgcgcttctccagggcctccagaaagaccagcttctcgccgatggacaccagatccgcgcgcacgcgcgtcgtctggggggcgctctcgagctcgtccagcgtctgccggttcaggtcgagctgctcctcctgcatctccagcaggtggcggcccacgtcgtccagacttcgcacggccttgcccatcacgagcgccgtgaccaggttggccccgttcaggaccatctcgccgtacgtcaccggcacgtcggcttcggtgtcctccactttcaggaaggactgcaggaggcgctgtttgatcggggcggtggtgacgagcaccccgtcgaccggccgcccgcgcgtgtcggcatgcgtcagacggggcacggccacggagggctgcgtggccgtggtgaggtccacgagccaggcctcgacggcctcccggcggtggcccgccttgcccaggaaaaagctcgtctcgcagaagcttcgctttagctcggcgaccagggtcgcccgggccaccctggtggccaggcggccgttgtccaggtatcgttgcatcggcaacaacaaagccaggggcggcgccttttccagcagcacgtgcagcatctggtcggccgtgccgcgctcaaacgccccgaggacggcctggacgttgcgagcgagctgttggatggcgcgcaactggcgatgcgcgccgatacccgtcccgtccagggcctcccccgtgagcagggcgatggcctcggtggccaggctgaaggcggcgttcagggcccggcggtcgataatcttggtcatgtaattgtgtgtgggttgctcgatggggtgcgggccgtcgcgggcaatcagcggctggtggacctcgaactgtacgcgcccctcgttcatgtaggccagctccggaaacttggtacacacgcacgccaccgacaacccgagctccagaaagcgcacgagcgacagggtgttgcaatacgaccccagcagggcgtcgaactcgacgtcgtacaggctgtttgcatcggagcgcacgcgggaaaaaaaatcaaacaggcgtcgatgcgacgccacctcgatcgtgctaaggagggacccggtcggcaccatggccgcggcataccggtatcccggagggtcgcggttgggagcggccatggggtcgcgtggagatcggctgtctctagcgatattggcccggggaggctaagatccaccccaacgcccggccacccgtgtacgtgcccgacggcccaaggtccaccgaaagacacgacgggcccggacccaaaaaggcgggggatgctgtgtgagaggccgggtgccggtcgggggggaaaggcaccgggagaaggctgcggcctcgttccaggagaacccagtgtccccaacagacccggggacgtgggatcccaggccttatatacccccccccccgccccacccccgttagaacgcgacgggtgcattcaagatggccctggtccaaaagcgtgccaggaagaaattggcagaggcggcaaagctgtccgccgccgccacccacatcgaggccccggccgcgcaggctatccccagggcccgtgtgcgcaggggatcggtgggcggcagcatttggttggtggcgataaagtggaaaagcccgtccggactgaaggtctcgtgggcggcggcgaacaaggcacacagggccgtgcctcccaaaaacacggacatcccccaaaacacgggcgccgacaacggcagacgatccctcttgatgttaacgtacaggaggagcgcccgcaccgcccacgtaacgtagtagccgacgatggcggccaggatacaggccggcgccaccacccttccggtcagcccgtaatacatgcccgctgccaccatctccaacggcttcaggaccaaaaacgaccaaaggaacagaatcacgcgctttgaaaagaccggctgggtatggggcggaagacgcgagtatgccgaactgacaaaaaaatcagaggtgccgtacgaggacaatgaaaactgttcctccagcggcagttctccctcctcccccccgaaggcggcctcgtcgaccagatctcgatccaccagaggaaggtcatcccgcatggtcatggggtgtgcggtggaggtggggagaccgaaaccgcaaagggtcgcttacgtcagcaggatcccgagatcaaagacacccgggttcttgcacaaacaccacccgggttgcatccgcggaggcgagtgttttgataaggccgttccgcgccttgatataacctttgatgttgaccacaaaacccggaatttacgcctacgccccaatgcccacgcaagatgaggtaggtaacccccccgtgggtgtgacgttgcgtttagttcattggaggccaaggggaaaaatggggtggggaggaaacggaaaacccagtaggccgtgtcgggaacacgcccggggttgtcctcaaaaggcagggtccatactacggaagccgtcgttgtattcgagacctgcctgtgcaacgcacgtcggggttgcctgtgtccggttcggcccccaccgcgtgcggcacgcacgaggacgagtccgcgtgctttattggcgttccaagcgttgccctccagtttctgttgtcggtgttcccccatacccacgcccacatccaccgtagggggcctctgggccgtgttacgtcgccgcccgcgatggagcttagctacgccaccaccatgcactaccgggacgttgtgttttacgtcacaacggaccgaaaccgggcctactttgtgtgcggggggtgtgtttattccgtggggcggccgtgtgcctcgcagcccggggagattgccaagtttggtctggtcgttcgagggacaggcccagacgaccgcgtggtcgccaactatgtacgaagcgagctccgacaacgcggcctgcaggacgtgcgtcccattggggaggacgaggtgtttctggacagcgtgtgtcttctaaacccgaacgtgagctccgagctggatgtgattaacacgaacgacgtggaagtgctggacgaatgtctggccgagtactgcacctcgctgcgaaccagcccgggtgtgctaatatccgggctgcgcgtgcgggcgcaggacagaatcatcgagttgtttgaacacccaacgatagtcaacgtttcctcgcactttgtgtataccccgtccccatacgtgttcgccctggcccaggcgcacctcccccggctcccgagctcgctggaggccctggtgagcggcctgtttgacggcatccccgccccacgccagccacttgacgcccacaacccgcgcacggatgtggttatcacgggccgccgcgccccacgacccatcgccgggtcgggggcggggtcggggggcgcgggcgccaagcgggccaccgtcagcgagttcgtgcaagtcaaacacattgaccgcgtgggccccgctggcgtttcgccggcgcctccgccaaacaacaccgactcgagttccctggtgcccggggcccaggattccgccccgcccggccccacgctaagggagctgtggtgggtgttttatgccgcagaccgggcgctggaggagccccgcgccgactctggcctcacccgcgaggaggtacgtgccgtacgtgggttccgggagcaggcgtggaaactgtttggctccgcgggggccccgcgggcgtttatcggggccgcgttgggcctgagccccctccaaaagctagccgtttactactatatcatccaccgagagaggcgcctgtcccccttccccgcgctagtccggctcgtaggccggtacacacagcgccacggcctgtacgtccctcggcccgacgacccagtcttggccgatgccatcaacgggctgtttcgcgacgcgctggcggccggaaccacagccgagcagctcctcatgttcgaccttctccccccaaaggacgtgccggtgggaagcgacgtgcaggccgacagcaccgctctgctgcgctttatagaatcgcaacgtctcgccgtccccgggggggtgatctcccccgagcacgtcgcgtaccttggtgcgttcctgagcgtgctgtacgctggccgcgggcgcatgtccgcagccacgcacaccgcgcggctgacaggggtgacctccctggtgctagcggtgggtgacgtggaccgtctttccgcgtttgaccgcggagcggcgggcgcggccagccgcacgcgggccgccgggtacctggatgtgcttcttaccgttcgtctcgctcgctcccaacacggacagtctgtgtaaaagaccccaataaacgtatatcgctactacacccttgtgtgtcaatggacgcctctccgggggggggggagggaaagcaaagaggggctgggggagcggcaccaccggggcctgaacaaacaaaccacagacacggttacagtttattcggtcgggcggagaaacggccgaagccacgcccactttattcgcgtctccaaaaaaacgggacacttgtccggagaacctttaggatgccagccagggcggcggtaatcataaccacgcccagcgcagaggcggccagaaacccgggcgcaattgcggccacgggctgcgtgtcaaaggctagcaaatgaatgacggttccgtttggaaatagcaacaaggccgtggacggcacgtcgctcgaaaacacgcttggggcgccctccgtcggcccggcggcgatttgctgctgtgtgttgtccgtatccaccagcaacacagacatgacctccccggccggggtgtagcgcataaacacggcccccacgagccccaggtcgcgctggttttgggtgcgcaccagccgcttggactcgatatcccgggtggagccttcgcatgtcgcggtgaggtaggttaggaacagtgggcgtcggacgtcgacgccggtgagcttgtagccgatcccccggggcagaggggagtgggtgacgacgtagctggcgttgtgggtgatgggtaccaggatccgtggctcgacgttggcagactgccccccgcaccgatgtgaggcctcagggacgaaggcgcggatcagggcgttgtagtgtgcccaacgcgtcagggtcgaggcgaggccgtgggtctgctgggccaggacttcgaccggggtctcggatcgggtggcttgagccagcgcgtccaggataaacacgctctcgtctagatcaaagcgcagggaggccgcgcatggcgaaaagtggtccggaagccaaaagagggttttctggtggtcggcccgggccagcgcggtccggaggtcggcgttggtcgctgcggcgacgtcggacgtacacagggccgaggctatcagaaggctccggcgggcgcgttcccgctgcaccgccgaggggacgccagccaagaacggctgccggaggacagccgaggcgtaaaatagcgcccggtggacgaccggggtggtcagcacgcggccccctagaaactcggcatacagggcgtcgatgagatgggctgcgctgggcgccactgcgtcgtacgccgaggggctatccagcacgaaggccagctgatagcccagcgcgtgtaatgccaagctctgttcgcgctccagaatctcggccaccaggtgctggagccgagcctctagctgcaggcgggccgtgggatccaagactgacacattaaaaaacacagaatccgcggcacagcccgcggccccgcgggcggccaacccggcaagcgcgcgcgagtgggccaaaaagcctagcaggtcggagaggcagaccgcgccgtttgcgtgggcggcgttcacgaaagcaaaacccgacgtcgcgagcagccccgttaggcgccagaagagaggggggcgcgggccctgctcggcgcccgcgtcccccgagaaaaactccgcgtatgcccgcgacaggaactgggcgtagttcgtgccctcctccgggtagccgcccacgcggcggagggcgtccagcgcggagccgttgtcggcccgcgtcagggaccctaggacaaagacccgataccgggggccgcccgggggcccgggaagagcccccggggggttttcgtccgcggggtccccgacccgatctagcgtctggcccgcggggaccaccatcacttccaccggagggctgtcgtgcatggatatcacgagccccatgaattcccgcccgtagcgcgcgcgcaccagcgcggcatcgcacccgagcaccagctcccccgtcgtccagatgcccacgggccacgtcgaggccgacggggagaaatacacgtacctacctggggatctcaacaggccccgggtggccaaccaggtcgtggacgcgttgtgcaggtgcgtgatgtccagctccgtcgtcgggtgccgccgggccccaaccggcggtcgggggggcggtgtatcacgcggcccgctcgggtggctcgccgtcgccacgttgtctccccgcgggaacgtcagggcctcggggtcagggacggccgaaaacgttacccaggcccgggaacgcagcaacacggaggcggctggattgtgcaagagacccttaaggggggcgaccgaggggggaggctgggcggtcggctcgaccgtggtgggggcgggcaggctcgcgttcgggggccggccgagcaggtaggtcttcgggatgtaaagcagctggccggggtcccgcggaaactcggccgtggtgaccaatacaaaacaaaagcgctcctcgtaccagcgaagaaggggcagagatgccgtagtcaggtttagttcgtccggcggcgccagaaatccgcgcggtggtttttgggggtcgggggtgtttggcagccacagacgcccggtgttcgtgtcgcgccagtacatgcggtccatgcccaggccatccaaaaaccatgggtctgtctgctcagtccagtcgtggacctgaccccacgcaacgcccaaaataataacccccacgaaccataaaccattccccatgggggaccccgtccctaacccacggggcccgtggctatggcagggcttgccgccccgacgttggctgcgagccctgggccttcacccgaacttgggggttggggtggggaaaaggaagaaacgcgggcgtattggtcccaatggggtctcggtggggtatcgacagagtgccagccctgggaccgaaccccgcgtttatgaacaaacgacccaacacccgtgcgttttattctgtctttttattgccgtcatagcgcgggttccttccggtattgtctccttccgtgtttcagttagcctcccccatctcccgggcaaacgtgcgcgccaggtcgcagatcgtcggtatggagcctggggtggtgacgtgggtctggaccatcccggaggtaagttgcagcagggcgtcccggcagccggcgggcgattggtcgtaatccaggataaagacgtgcatgggacggaggcgtttggccaagacgtccaaagcccaggcaaacacgttatacaggtcgccgttgggggccagcaactcgggggcccgaaacagggtaaataacgtgtccccgatatggggtcgtgggcccgcgttgctctggggctcggcaccctggggcggcacggccgcccccgaaagctgtccccaatcctcccgccacgacccgccgccctgcagataccgcaccgtattggcaagcagcccataaacgcggcgaatcgcggccagcatagccaggtcaagccgctcgccggggcgctggcgtttggccaggcggtcgatgtgtctgtcctccggaagggcccccaacacgatgtttgtgccgggcaaggtcggcgggatgagggccacgaacgccagcacggcctggggggtcatgctgcccataaggtatcgcgcggccgggtagcacaggagggcggcgatgggatggcggtcgaagatgagggtgagggccgggggcggggcatgtgagctcccagcctcccccccgatatgaggagccagaacggcgtcggtcacggcataaggcatgcccattgttatctgggcgcttgtcattaccaccgccgcgtccccggccgatatctcaccctggtcgaggcggtgttgtgtggtgtagatgttcgcgattgtctcggaagcccccaacacccgccagtaagtcatcggctcgggtacgtagacgatatcgtcgcgcgaacccagggccaccagcagttgcgtggtggtggttttccccatcccgtggggaccgtctatataaacccgcagtagcgtgggcattttctgctccaggcggacttccgtggctttttgctgccggcgagggcgcaacgccgtacgtcggttgttatggccgcgagaacgcgcagcctggtcgaacgcagacgcgtgttgatggcaggggtacgaagccatacgcgcttctacaaggcgctggccgaagaggtgcgggagtttcacgccaccaagatctgcggcacgctgttgacgctgttaagcgggtcgctgcagggtcgctcggtattcgaggccacacgcgtcaccttaatatgcgaagtggacctgggaccgcgccgccccgactgcatctgcgtgttcgaattcgccaatgacaagacgctgggcggggtttgtgtcatcatagaactaaagacatgcaaatatatttcttccggggacaccgccagcaaacgcgagcaacgggccacggggatgaagcagctgcgccactccctgaagctcctgcagtccctcgcgcctccgggtgacaagatagtgtacctgtgccccgtcctggtgtttgtcgcccaacggacgctccgcgtcagccgcgtgacccggctcgtcccgcagaaggtctccggtaatatcaccgcagtcgtgcggatgctccagagcctgtccacgtatacggtccccattgagcctaggacccagcgagcccgtcgccgccgcggcggcgccgcccgggggtctgcgagcagaccgaaaaggtcacactctggggcgcgcgacccgcccgagtcagcggcccgccagttaccacccgccgaccaaacccccgcctccacggagggcgggggggtgcttaagaggatcgcggcgctcttctgcgtgcccgtggccaccaagaccaaaccccgagccgcctccgaatgagagtgtttcgttccttccccctccccccgcgtcagacaaaccctaaccaccgcttaagcggcccccgcgaggtccgaagactcatttggatccggcgggagccacccgacaacagcccccgggttttcccacgccagacgccggtccgctgtgccatcgcgccccctcatcccaccccccatcttgtccccaaataaaacaaggtctggtagttaggacaacgaccgcagttctcgtgtgttattttcgctctccgcctctcgcagatggacccgtactgcccatttgacgctctggacgtctgggaacacaggcgcttcatagtcgccgattcccgaaacttcatcacccccgagttcccccgggacttttggatgtcgcccgtctttaacctcccccgggagacggcggcggagcaggtggtcgtcctacaggcccagcgcacagcggctgccgctgccctggagaacgccgccatgcaggcggccgagctccccgtcgatatcgagcgccggttacgcccgatcgaacggaacgtgcacgagatcgcaggcgccctggaggcgctggagacggcggcggccgccgccgaagaggcggatgccgcgcgcggggatgagccggcgggtgggggcgacgggggggcgcccccgggtctggccgtcgcggagatggaggtccagatcgtgcgcaacgacccgccgctacgatacgacaccaacctccccgtggatctgctacacatggtgtacgcgggccgcggggcgaccggctcgtcgggggtggtgttcgggacctggtaccgcactatccaggaccgcaccatcacggactttcccctgaccacccgcagtgccgactttcgggacggccgtatgtccaagaccttcatgacggcgctggtactgtccctgcaggcgtgcggccggctgtatgtgggccagcgccactattccgccttcgagtgcgccgtgttgtgtctctacctgctgtaccgaaacacgcacggggccgccgacgatagcgaccgcgctccggtcacgttcggggatctgctgggccggctgccccgctacctggcgtgcctggccgcggtgatcgggaccgagggcggccggccacagtaccgctaccgcgacgacaagctccccaagacgcagttcgcggccggcgggggccgctacgaacacggagcgctggcgtcgcacatcgtgatcgccacgctgatgcaccacggggtgctcccggcggccccgggggacgtcccccgggacgcgagtacccacgttaaccccgacggcgtggcgcaccacgacgacataaaccgcgccgccgccgcgttcctcagccggggccacaacctattcctgtgggaggaccagactctgctgcgggcaaccgcgaacaccataacggccctgggcgttatccagcggctcctcgcgaacggcaacgtgtacgcggaccgcctcaacaaccgcctgcagctgggcatgctgatccccggagccgtcccttcggaggccatcgcccgtggggcctccgggtccgactcgggggccatcaagagcggagacaacaatctggaggcgctatgtgccaattacgtgcttccgctgtaccgggccgacccggcggtcgagctgacccagctgtttcccggcctggccgccctgtgtcttgacgcccaggcggggcggccggtcgggtcgacgcggcgggtggtggatatgtcatcgggggcccgccaggcggcgctggtgcgcctcaccgccctggaactcatcaaccgcacccgcacaaaccccacccctgtgggggaggttatccacgcccacgacgccctggcgatccaatacgaacaggggcttggcctgctggcgcagcaggcacgcattggcttgggctccaacaccaagcgtttctccgcgttcaacgttagcagcgactacgacatgttgtactttttatgtctggggttcattccacagtacctgtcggcggtttagtgggtggtgggcgaggggggagggggcattagggagaaagaacaagagcctccgttgggttttctttgtgcctgtactcaaaaggtcataccccgtaaacggcgggctccagtcccggcccggcggttggcgtgaacgcaacggcgggagctgggttagcgtttagtttagcattcgctctcgcctttccgcccgccccccgaccgttgcgcctttttttttttcgtccaccaaagtctctgtgggtgcgcgcatggcagccgatgccccgggagaccggatggaggagcccctgcccgacagggccgtgcccatttacgtggctgggtttttggccctgtatgacagcggggactcgggcgagttggcattggatccggatacggtgcgggcggccctgcctccggataacccactcccgattaacgtggaccaccgcgctggctgcgaggtggggcgggtgctggccgtggtcgacgacccccgcgggccgttttttgtggggctgatcgcctgcgtgcagctggagcgcgtcctcgagacggccgccagcgctgcgattttcgagcgccgcgggccgccgctctcccgggaggagcgcctgttgtacctgatcaccaactacctgccctcggtctccctggccacaaaacgcctggggggcgaggcgcaccccgatcgcacgctgttcgcgcacgtcgcgctgtgcgcgatcgggcggcgcctcggcactatcgtcacctacgacaccggtctcgacgccgccatcgcgccctttcgccacctgtcgccggcgtctcgcgagggggcgcggcgactggccgccgaggccgagctcgcgctgtccgggcgcacctgggcgcccggcgtggaggcgctgacccacacgctgctttccaccgccgttaacaacatgatgctgcgggaccgctggagcctggtggccgagcggcggcggcaggccgggatcgccggacacacctacctccaggcgagcgaaaaattcaaaatgtggggggcggagcctgtttccgcgccggcgcgcgggtataagaacggggccccggagtccacggacataccgcccggctcgatcgctgccgcgccgcagggtgaccggtgcccaatcgtccgtcagcgcggggtcgccttgtccccggtactgccccccatgaaccccgttccgacatcgggcaccccggcccccgcgccgcccggcgacgggagctacctgtggatcccggcctcccattacaaccagctcgtcgccggccatgccgcgccccaaccccagccgcattccgcgtttggtttcccggctgcggcggggtccgtggcctatgggcctcacggtgcgggtctttcccagcattaccctccccacgtcgcccatcagtatcccggggtgctgttctcgggacccagcccactcgaggcgcagatagccgcgttggtgggggccatagccgcggaccgccaggcgggcggtcagccggccgcgggagaccctggggtccgggggtcgggaaagcgtcgccggtacgaggcggggccgtcggagtcctactgcgaccaggacgaaccggacgcggactacccgtactaccccggggaggctcgaggcgggccgcgcggggtcgactcccggcgcgcggcccgccattctcccgggaccaacgagaccatcacggcgctgatgggggcggtgacgtctctgcagcaggaactggcgcacatgcgggctcggaccagcgccccctatggaatgtacacgccggtggcgcactatcgccctcaggtgggggagccggaaccaacaacgacccacccggccctttgtcccccggaggccgtgtatcgccccccaccacacagcgccccctacggtcctccccagggtccggcgtcccatgcccccactcccccgtatgccccagctgcctgcccgccaggcccgccaccgcccccatgtccttccacccagacgcgcgcccctctaccgacggagcccgcgttcccccccgccgccaccggatcccaaccggaggcatccaacgcggaggccggggcccttgtcaacgccagcagcgcagcacacgtggacgttgacacggcccgcgccgccgatttgttcgtctctcagatgatgggggcccgctgattcgccccggtctttggtaccatgggatgtcttactgtatatctttttaaataaaccaggtaataccaaataagacccattggtgtatgttctttttttattgggaggcgcgggtaggcgggtagctttacaatgcaaaagccttcgacgtggaggaaggcgtggggggggggggaatcggcactgaccaagggggtccgttttgtcacgggaaaggaaagaggaaacaggccgcggacacccgggggagtttgtgttcccttttctttcttcccacacacacaaaaggcgtaccaaacaaacaaaccaaaagatgcacatgcggtttaacacccgtggtttttatttacaacaaaccccccatcacaggtcgtcctcgtcggcgtcaccgtctttgttgggaacttgggtgtagttggtgttgcggcgcttgcgcatgaccatgtcggtgaccttggcgctgagcagcgcgctcgtgcccttcttcttggccttgtgttccgtgcgctccatggcagacaccagggccatgtaccgtatcatctcccgggcctcggctagcttggcctcgtcaaagtcgccgccctcctcgccctccccggacgcgtccgggttggtggggttcttgagctccttggtggttagcgggtacagggccttcatggggttgctctgcagccgcatgacgtagcgaaaggcgaagaaggccgccgccaggccggccaggaccaacagacccacggccagcgccccaaaggggttggacatgaaggaggacacgcccgacacggccgataccacgccgcccacgatgcccatcaccaccttgccgaccgcgcgccccaggtcgcccatcccctcgaagaacgcgcccaggcccgcaaacatggcggcgttggcgtcggcgtggatgaccgtgtcgatgtcggcgaagcgcaggtcgtgcagctggttgcggcgctggacctccgtgtagtccagcaggccgctgtccttgatctcgtggcgggtgtacacctccagggggacaaactcgtgatcctccagcatggtgatgttgaggtcgatgaaggtgctgacggtggtgatgtcggcgcggctcagctggtgggagtacgcgtactcctcgaagtacacgtagcccccaccgaaggtgaagtagcgccggtgtcccacggtgcacggctcgatcgcatcgcgcgtcagccgcagctcgttgttctcccccagctgcccctcgaccaacgggccctggtcttcgtaccgaaagctgaccagggggcggctgtagcaggccccgggccgcgagctgatgcgcatcgagttttggacgatcacgttgtccgcggcgaccggcacgcacgtggagacggccatcacgtcgccgagcatccgcgcgctcacccgccggcccacggtggccgaggcgatggcgttggggttcagcttgcgggcctcgttccacagggtcagctcgtgattctgcagctcgcaccacgcgatggcaacgcggcccaacatatcgttgacatggcgctgtatgtggttgtacgtaaactgcagcctggcgaactcgatggaggaggtggtcttgatgcgctccacggacgcgttggcgctggccccgggcggcgggggcgtggggtttgggggcttgcggctctgctcgcggaggtgttcccgcacgtacagctccgcgagcgtgttgctgagaaggggctggtacgcgatcagaaagcccccattggccaggtagtactgcggctggcccaccttgatgtgcgtcgcgttgtacctgcgggcgaagatgcggtccatggcgtcgcgggcgtccttgccgatgcagtcccccaggtccacgcgcgagagcgggtactcggtcaggttggtggtgaaggtggtggatatggcgtcggaagagaatcggaaggagccgccgtactcggagcgcagcatctcgtccacctcctgccacttggtcatggtgcagaccgacgggcgctttggcacccagtcccaggccacggtgaacttgggggtcgtgagcaggttccgggtggtcggcgccgtggcccgggccttggtggtgaggtcgcgcgcgtagaagccgtcgacctgcttgaagcggtcggcggcgtagctggtgtgttcggtgtgcgacccctcccggtagccgtaaaacggggacatgtacacaaagtcgccagtcgccaacacaaactcgtcgtacgggtacaccgagcgcgcgtccacctcctcgacgatgcagtttaccgtcgtcccgtaccggtggaacgcctccacccgcgaggggttgtacttgaggtcggtggtgtgccagccccggctcgtgcgggtcgcggcgttggccggtttcagctccatgtcggtctcgtggtcgtcccggtgaaacgcggtggtctccaggttgttgcgcacgtacttggccgtggaccgacagacccccttggcgttgatcttgtcgatcacctcctcgaaggggacgggggcgcggtcctcaaagatccccataaactgggagtagcggtggccgaaccacacctgcgaaacggtgacgtctttgtagtacatggtggccttgaacttgtacggggcgatgttctccttgaagaccaccgcgatgccctccgtgtagttctgaccctcgggccgggtcgggcagcggcgcggctgctcgaactgcaccaccgtggcgcccgtggggggtgggcacacgtaaaagtttgcatcggtgttctccgccttgatgtcccgcaggtgctcgcgcagggtggcgtggcccgcggcgacggtcgcgttgtcgccggcggggcgcggcggctttgggggtttcggttttttgttcttcttcggtttcgggtcccccgttgggggggcgccaggggcgggcggcgccggagtggcagggcccccgttcgccgcctgggtcgcggccgcgaccccaggcgtgccgggggaactcggagccgccgacgccaccaggacccccagcgtcaaccccaagagcgcccatacgacgaaccaccggcgcccccgcgcgggggcgccctggcgcatggcgggactacgggggcccgtcgtgccccccgtcaggtagcctgggggcgaggtgctggaggaccgagtagaggatcgagaaaacgtctcggtcgtagaccacgaccgaccgggggccgatacagccgtcgggggcgctctcgacgatggccaccagcggacagtcggagtcgtacgtgagatatacgccgggcgggtaacggtaacgaccttcggaggtcgggcggctgcagtccgggcggcgcaactcgagctccccgcaccggtagaccgaggcaaagagtgtggtggcgataatcagctcgcgaatatatcgccaggcggcgcgctgagtgggcgttattccggaaatgccgtcaaaacagtaaaacctctgaaattcgctgacggcccaatcagcacccgagccccccgcccccatgatgaaccgggcgagctcctccttcaggtgcggcaggagccccacgttctcgacgctgtaatacagcgcggtgttggggggctgggcgaagctgtgggtggagtgatcaaagaggggcccgttgacgagctcgaagaagcgatgggtgatgctggggagcagggccgggtccacctggtgtcgcaggagagacgctcgcatgaaccggtgcgcgtcgaacacgcccggcgccgagcggttgtcgatgaccgtgcccgcgcccgccgtcagggcgcagaagcgcgcgcgcgccgcaaagccgttggcgaccgcggcgaacgtcgcgggcagcacctcgccgtggacgctgacccgcagcatcttctcgagctccccgcgctgctcgcggacgcagcgccccaggctggccaacgaccgcttcgtcaggcggtccgcgtacagccgccgtcgctcccgcacgtccgcggccgcttgcgtggcgatgtccccccacgtctcgggcccctgccccccgggcccgcggcgacggtcttcgtcctcgcccccgcccccgggagctcccaacccccgtgccccttcctctacggcgacacggtccccgtcgtcgtcggggcccgcgccgcccttgggcgcgtccgccgcgccccccgcccccatgcgcgccagcacgcgacgcagcgcctcctcgtcgcactgttcggggctgacgaggcgccgcaagagcggcgtcgtcaggtggtggtcgtagcacgcgcggatgagcgcctcgatctgatcgtcgggtgacgtggcctgaccgccgattattagggcgtccaccatatccagcgccgccaggtggctcccgaacgcgcgatcgaaatgctccgcccgccgcccgaacagcgccagttccacggccaccgcggcggtctcctgctgcaactcgcgccgcgccagcgcggtcaggttgctggcaaacgcgtccatggtggtctggccggcgcggtcgccggacgcgagccagaatcgcaattcgctgatggcgtacaggccgggcgtggtggcctgaaacacgtcgtgcgcctccagcagggcgtcggcctccttgcggaccgagtcgttctcgggcgacgggtggggctgcccgtcgccccccgcggtccgggccagcgcatggtccaacacggagagcgcccgcgcgcggtcggcgtccgacagcccggcggcgtggggcaggtaccgccgcagctcgttggcgtccagccgcacctgcgcctgctgggtgacgtggttacagatacggtccgccaggcggcgggcgatcgtcgccccctggttcgccgtcacacacagttcctcgaaacagaccgcgcaggggtgggacgggtcgctaagctccggggggacgataaggcccgaccccaccgcccccaccataaactcccgaacgcgctccagcgcggcggtggcgccgcgcgagggggtgatgaggtggcagtagtttagctgctttagaaagttctcgacgtcgtgcaggaaacacagctccatatggacggtcccgccatacgtatccagcctgacccgttggtgatacggacagggtcgggccaggcccatggtctccgtgaaaaacgccgcgacgtctcccgcggtcgcgaacgtctccaggctgcccaggagccgctcgccctcgcgccacgcgtactctagcagcaactccagggtgaccgacagcggggtgagaaaggccccggcctgggcctccaggcccggcctcagacgacgccgcagcgcccgcacctgaagcgcgttcagcttcagttgggggagcttcccccgtccgatgtgggggtcgcaccgccggagcagctctatctgaaacacataggtctgcacctgcccgagcagggctaacaacttttgacgggccacggtgggctcggacaccggggcggccatctcgcggcgccgatctgtaccgcggccggagtatgcggtggaccgaggcggtccgtacgctacccggcgtctggctgagccccggggtccccctcttcggggcggcctcccgcgggcccgccgaccggcaagccgggagtcggcggcgcgtgcgtttctgctctattcccagacaccgcggagaggaatcacggcccgcccagagatatagacacggaacacaaacaagcacggatgtcgtagcaataatttattttacacacattccccgccccgccctaggttcccccaccccccaacccctcacagcatatccaacgtcaggtctccctttttgtcggggggcccctccccaaacgggtcatccccgtggaacgcccgtttgcggccggcaaatgccggtcccggggcccccgggccgccgaacggcgtcgcgttgtcgtcctcgcagccaaaatccccaaagttaaacacctccccggcgttgccgagttggctgactagggcctcggcctcgtgcgccacctccagggccgcgtccgtcgaccactcgccgttgccgcgctccagggcacgcgcggtcagctccatcatctcctcgcttaggtactcgtcctccaggagcgccagccagtcctcgatctgcagctgctgggtgcggggccccaggcttttcacggtcgccacgaacacgctactggcgacggccgccccgccctcggagataatgccccggagctgctcgcacagcgagctttcgtgcgctccgccgccgaggcttgaggccgcgcacacaaacccggcccggggacaggccaggacgaacttgcgggtgcggtcaaaaataaggagcgggcacgcgtttttgccgcccatcaggctggcccagttcccggcctgaaacacacggtcgttgccggccatgccgtagtacttgctgatgctcaaccccaacacgaccatggggcgcgccgccatgacgggccgcagcaggttgcagctggcgaacatggacgtccacgcgcccggatgcgcgtccacggcgtccatcagcgcgcgggccccggcctccaggcccgccccgccctgcgcggaccacgcggccgcagcctgcacgctggggggacggcgggaccccgcgatgatggccgtaagggtgttgatgaagtatgtcgagtgatcgcagtaccgcagaatctggtttgccatgtagtacatcgccagctcgctcacgttgttgggggccaggttaataaagtttatcgcgccgtagtccagggaaaactttttaatgaacgcgatggtctcgatgtcctcgcgcgacaggagccgggcgggaagctggttgcgttggagggccgtccagaaccactgcgggttcggctggttggaccccgggggcttgccgttggggaagatggccgcgtggaactgcttcagcagaaagcccagcggtccgaggaggatgtccacgcgcttgtcgggcttctggtaggcgctctggaggctggcgacccgcgccttggcggcctcggacgcgttggcgctcgcgcccgcgaacaacacgcggctcttgacgcgcagctccttgggaaaccccagggtcacgcgggcaacgtcgccctcgaagctgctctcggcgggggccgtctggccggccgttaggctgggggcgcagatagccgccccctccgagagcgcgaccgtcagcgttttggccgacagaaacccgttgttaaacatgtccatcacgcgccgccgcagcaccggttggaattgattgcgaaagttgcgcccctcgaccgactgcccggcgaacaccccgtggcactgactcagggccaggtcctggtacacggcgaggttggatcgccgcccgagaagctgaagcagggggcacggcccgcacgcgtacgggtccagcgtcagggacatggcgtggttggcctcgcccagaccgtcgcgaaacttgaagttcctcccctccaccaggttgcgcatcagctgctccacctcgcggtccacgacctgcctgacgttgttcaccaccgtatgcagggcctcgcggttggtgatgatggtctccagccgccccatggccgtggggaccgcctggtccacgtactgcagggtctcgagttcggccatgacgcgctcggtcgccgcgcggtacgtctcctgcatgatggtccgggcggtctcggatccgtccgcgcgcttcagggccgagaaggcggcgtagtttcccagcacgtcgcagtcgctgtacatgctgttcatggtcccgaagacgccgatggctccgcgggcggcgctggcgaactttggatggcgcgcccggaggcgcatgagcgtcgtgtgtacgcaggcgtggcgcgtgtcgaaggtgcataggttacagggcacgtcggtctggttggagtccgcgacgtatcgaaacacgtccatctcctggcgcccgacgatcacgccgccgtcgcagcgctccaggtaaaacagcatcttggccagcagcgccggggaaaacccacacagcatggccaggtgctcgccggcaaattcctgggttccgccgacgaggggcgcggtgggccgaccctcgaacccgggcaccacgtgtccctcgcggtccacctgtgggttggccgccacgtgggtcccgggcacgaggaagaagcggtaaaaggagggtttgctgtggtcctttgggtccgccgggccggcgtcgtccacctcggtgagatggagggccgagttggtgctaaataccatggcccccacgagtcccgcggcgcgcgccaggtacgccccgacggcgttggcgcgggccgcggccgtgtcctggccctcgaacagcggccacgcggagatgtcggtgggcggctcgtcaaagacggccatcgacacgatagactcgagggccagggcggcgtctccggccatgacggaggccaggcgctgttcgaacccgcccgccgggcccttgccgccgccgtcgcgcccgccccgcggggtcttaccctggctggcttcgaaggccgtgaacgtaatgtcggcggggagggcggcgccctcgtggttttcgtcaaacgccaggtgggcggccgcgcgggccacggcgtccacgtttcggcatcgcagtgccacggcggcgggtcccacgaccgcctcgaacaggaggcggttgagggggcggttaaaaaacggaagcgggtaggtaaaattctccccgatcgatcggtggttggcgttgaacggctctgcgatgacacggctaaaatccggcatgaacagctgcaacgggtacacgggtatgcggtgcacctccgccccgcctatggttaccttgtccgagcctcccaggtgcagaaaggtgttgttgatgcacacggcctccttgaagccctcggtaacgaccagatacaggagggcgcggtccgggtccaggccgaggcgctcacacagcgcctcccccgtcgtctcgtgtttgaggtcgccgggccggggggtgtagtccgaaaagccaaaatggcggcgtgcccgctcgcaaagtcgcgtcaggttcggggcctgggtgctggggtccaggtgccggccgccgtgaaagacgtacacggacgagctgtagtgcgagggcgtcagtttcagggacaccgcggtacccccgagccccgtcgtgcgagaacccacgaccacggccacgttggcctcaaagccgctctccacggtcaggcccacgaccaggggcgccacggcgacgtcggaatcgccgctgcgtgccgacagtaacgccagaagctcgatgccttcggacggacacgcgcgagcgtacacgtatcccaggggcccgggggggaccttgatggtggttgccgtcttgggctttgtctccatgtccttttgtcaatcggtccgcgaacggaggtaatcccggcacgacgacggacgcccgacaaggtatgtctcccgagcgtcaaaatccgggggggggcggcgacggtcaaggggagggttggagaccggggttggggaatgaatccctccccttcaccgacaaccccccgggtaaccacggggtgccgatgaaccccggcggccggcaacgcggggtccctgcgagaggcacagatgcttacggtcaggtgctccgggtcgggtgcgtctggtatgcggttggtatatgtacactttacctgggggcgtgccggtccgccccagcccctcccacgccccgcgcgtcatcagccggtgggcgtggccgctattataaaaaaagtgagaacgcgaagcgttcgcactttgtcctaataatatatatattattaggacaaagtgcgaacgcttcgcgttctcactttttttataatagcggccacgcccaccggctacgtcactctcctgtcggccgccggcggtccataagcccggccggccgggccgacgcgaataaaccgggccgccggccggggcgccgcgcagcagctcgccgcccggatccgccagacaaacaaggcccttgcacatgccggcccgggcgagcctgggggtccggtaattttgccatcccacccaagcggctttttgggtttttctcttcccccctccccacattcccctctttaggggttcgggtgggaacaaccgcgatgttttccggtggcggcggcccgctgtcccccggaggaaagtcggcggccagggcggcgtccgggttttttgcgcccgccggccctcgcggagccagccggggacccccgccttgtttgaggcaaaacttttacaacccctacctcgccccagtcgggacgcaacagaagccgaccgggccaacccagcgccatacgtactatagcgaatgcgatgaatttcgattcatcgccccgcgggtgctggacgaggatgcccccccggagaagcgcgccggggtgcacgacggtcacctcaagcgcgcccccaaggtgtactgcgggggggacgagcgcgacgtcctccgcgtcgggtcgggcggcttctggccgcggcgctcgcgcctgtggggcggcgtggaccacgccccggcggggttcaaccccaccgtcaccgtctttcacgtgtacgacatcctggagaacgtggagcacgcgtacggcatgcgcgcggcccagttccacgcgcggtttatggacgccatcacaccgacggggaccgtcatcacgctcctgggcctgactccggaaggccaccgggtggccgttcacgtttacggcacgcggcagtacttttacatgaacaaggaggaggtcgacaggcacctacaatgccgcgccccacgagatctctgcgagcgcatggccgcggccctgcgcgagtccccgggcgcgtcgttccgcggcatctccgcggaccacttcgaggcggaggtggtggagcgcaccgacgtgtactactacgagacgcgccccgctctgttttaccgcgtctacgtccgaagcgggcgcgtgctgtcgtacctgtgcgacaacttctgcccggccatcaagaagtacgagggtggggtcgacgccaccacccggttcatcctggacaaccccgggttcgtcaccttcggctggtaccgtctcaaaccgggccggaacaacacgctagcccagccgcgggccccgatggccttcgggacatccagcgacgtcgagtttaactgtacggcggacaacctggccatcgaggggggcatgagcgacctaccggcatacaagctcatgtgcttcgatatcgaatgcaaggcggggggggaggacgagctggcctttccggtggccgggcacccggaggacctggtcatccagatatcctgtctgctctacgacctgtccaccaccgccctggagcacgtcctcctgttttcgctcggttcctgcgacctccccgaatcccacctgaacgagctggcggccaggggcctgcccacgcccgtggttctggaattcgacagcgaattcgagatgctgttggccttcatgacccttgtgaaacagtacggccccgagttcgtgaccgggtacaacatcatcaacttcgactggcccttcttgctggccaagctgacggacatttacaaggtccccctggacgggtacggccgcatgaacggccggggcgtgtttcgcgtgtgggacataggccagagccacttccagaagcgcagcaagataaaggtgaacggcatggtgaacatcgacatgtacgggattataaccgacaagatcaagctctcgagctacaagctcaacgccgtggccgaagccgtcctgaaggacaagaagaaggacctgagctatcgcgacatccccgcctactacgccgccgggcccgcgcaacgcggggtgatcggcgagtactgcatacaggattccctgctggtgggccagctgttttttaagtttttgccccatctggagctctcggccgtcgcgcgcttggcgggtattaacatcacccgcaccatctacgacggccagcagatccgcgtctttacgtgcctgctgcgcctggccgaccagaagggctttattctgccggacacccaggggcgatttaggggcgccgggggggaggcgcccaagcgtccggccgcagcccgggaggacgaggagcggccagaggaggagggggaggacgaggacgaacgcgaggagggcgggggcgagcgggagccggagggcgcgcgggagaccgccggcaggcacgtggggtaccagggggccagggtccttgaccccacttccgggtttcacgtgaaccccgtggtggtgttcgactttgccagcctgtaccccagcatcatccaggcccacaacctgtgcttcagcacgctctccctgagggccgacgcagtggcgcacctggaggcgggcaaggactacctggagatcgaggtgggggggcgacggctgttcttcgtcaaggctcacgtgcgagagagcctcctcagcatcctcctgcgggactggctcgccatgcgaaagcagatccgctcgcggattccccagagcagccccgaggaggccgtgctcctggacaagcagcaggccgccatcaaggtcgtgtgtaactcggtgtacgggttcacgggagtgcagcacggactcctgccgtgcctgcacgttgccgcgacggtgacgaccatcggccgcgagatgctgctcgcgacccgcgagtacgtccacgcgcgctgggcggccttcgaacagctcctggccgatttcccggaggcggccgacatgcgcgcccccgggccctattccatgcgcatcatctacggggacacggactccatctttgtgctgtgccgcggcctcacggccgccgggctgacggccgtgggcgacaagatggcgagccacatctcgcgcgcgctgtttctgccccccatcaaactcgagtgcgaaaagacgttcaccaagctgctgctgatcgccaagaaaaagtacatcggcgtcatctacgggggtaagatgctcatcaagggcgtggatctggtgcgcaaaaacaactgcgcgtttatcaaccgcacctccagggccctggtcgacctgctgttttacgacgataccgtctccggagcggccgccgcgttagccgagcgccccgcggaggagtggctggcgcgacccctgcccgagggactgcaggcgttcggggccgtcctcgtagacgcccatcggcgcatcaccgacccggagagggacatccaggactttgtcctcaccgccgaactgagcagacacccgcgcgcgtacaccaacaagcgcctggcccacctgacggtgtattacaagctcatggcccgccgcgcgcaggtcccgtccatcaaggaccggatcccgtacgtgatcgtggcccagacccgcgaggtagaggagacggtcgcgcggctggccgccctccgcgagctagacgccgccgccccaggggacgagcccgccccccccgcggccctgccctccccggccaagcgcccccgggagacgccgtcgcctgccgaccccccgggaggcgcgtccaagccccgcaagctgctggtgtccgagctggccgaggatcccgcatacgccattgcccacggcgtcgccctgaacacggactattacttctcccacctgttgggggcggcgtgcgtgacattcaaggccctgtttgggaataacgccaagatcaccgagagtctgttaaaaaggtttattcccgaagtgtggcaccccccggacgacgtggccgcgcggctccggaccgcagggttcggggcggtgggtgccggcgctacggcggaggaaactcgtcgaatgttgcatagagcctttgatactctagcatgagccccccgtcgaagctgatgtccctcattttacaataaatgtctgcggccgacacggtcggaatctccgcgtccgtgggtttctctgcgttgcgccggaccacgagcacaaacgtgctctgccacacgtgggcgacgaaccggtaccccgggcacgcggtgagcatccggtctatgagccggtagtgcaggtgggcggacgtgccgggaaagatgacgtacagcatgtggcccccgtaagtggggtccgggtaaaacaacagccgcgggtcgcacgccccgcctccgcgcaggatcgtgtggacgaaaaaaagctcgggttggccaagaatcccggccaagaggtcctggaggggggcgttgtggcggtcggccaacacgaccaaggaggccaggaaggcgcgatgctcgaatatcgtgttgatctgctgcacgaaggccaggattagggcctcgcggctggtggcggcgaaccgcccgtctcccgcgttgcacgcgggacagcaacccccgatgcctaggtagtagcccatcccggagagggtcaggcagttgtcggccacggtctggtccagacagaagggcagcgagacgggagtggtcttcaccaggggcaccgagagcgagcgcacgatggcgatctcctcggagggcgtctgggcgagggcggcgaaaaggccccgatagcgctggcgctcgtgtaaacacagctcctgtttgcgggcgtgaggcggcaggctcttccgggaggcccgacgcaccacgcccagagtcccgccggccgcagaggagcgcgaccgccggcgctccttgccgtgatagggcccgggccgggagccgcggcgatgggggtcggtgtcatacataggtacacagggtgtgctccagggacaggagcgagatcgagtggcgtctaagcagcgcgcccgcctcacggacaaatgtggcgagcgcggtgggctttggtacaaatacctgatacgtcttgaaggtgtagatgagggcacgcaacgctatgcagacacgcccctcgaactcgttcccgcaggccagcttggccttgtggagcagcagctcgtcgggatgggtggcggggggatggccgaacagaacccaggggtcaacctccatctccgtaatggcgcacatggggtcacagaacatgtgcttaaagatggcctcgggccccgcggcccgaagcaggctcacaaaccggcccccgtccccgggctgcgtctcggggtcagcctcgagctggtcgacgacgggtacgatacagtcgaagaggctcgtgttgttttccgagtagcggaccacggaggcccggagtctgcgcagggccagccagtaagcacgcaccagtaacaggttacacagcaggcattctccgccggtgcgcccgcgcccccggccgtgtttcagcacggtggccatcagagggcccaggtcgaggtcgggctgggcatcgggttcggtaaactgcgcaaagcgcggagccacgtcgcgcgtgcgtgccccgcgatgcgcttcccaggactggcggaccgtggcgcgacgggcctccgcggcagcgcgcagctggggccccgactcccagacggcgggggtgccggcgaggagcaacaggaccagatccgcgtacgcccacgtatccggcgactcctccggctcgcggtccccggcgaccgtctcgaattccccgttgcgagcggcggcgcgagtacagcagctgtccccgcccccgcgccgaccctccgtgcagtccaggagacgggcgcaatccttccagttcatcagcgcggtggtgagcgacggctgcgtgccggatcccgccgccgaccccgccccctcctcgcccccggaggccaaggttccgatgagggcccgggtggcagactgcgccaggaacgagtagttggagtactgcaccttggcggctcccggggagggcgagggcttgggttgcttctgggcatgccgcccgggcaccccgccgtcggtacggaagcagcagtggagaaaaaagtgccggtggatgtcgtttatggtgagggcaaagcgtgcgaaggagccgaccagggtcgccttcttggtgcgcagaaagtggcggtccatgacgtacacaaactcgaacgcggccacgaagatgctagcggcgcagtggggcgcccccaggcatttggcacagagaaacgcgtaatcggccacccactgaggcgagaggcggtaggtttgcttgtacagctcgatggtgcggcagaccagacagggccggtccagcgcgaaggtgtcgatggccgccgcggaaaagggcccggtgtccaaaagcccctccccacagggatccgggggcgggttgcggggtcctccgcgcccgcccgaaccccctccgtcgcccgcccccccgcgggcccttgagggggcggtgaccacgtcggcggcgacgtcctcgtcgagcgtaccgacgggcggcacacctatcacgtgactggccgtcaggagctcggcgcagagagcctcgttaagagccaggaggctgggatcgaaggccacatacgcgcgctcgaacgcccccgccttccagctgctgccgggggactcttcgcacaccgcgacgctcgccaggaccccggggggcgaagttgccatggctgggcgggaggggcgcacgcgccagcgaactttacgggacacaatccccgactgcgcgctgcggtcccagaccctggagagtctagacgcgcgctacgtctcgcgagacggcgcgcatgacgcggccgtctggttcgaggatatgacccccgccgagctggaggttgtcttcccgactacggacgccaagctgaactacctgtcgcggacgcagcggctggcctccctcctgacgtacgccgggcctataaaagcgcccgacgacgccgccgccccgcagaccccggacaccgcgtgtgtgcacggcgagctgctcgcccgcaagcgggaaagattcgcggcggtcattaaccggttcctggacctgcaccagattctgcggggctgacgcgcgtgctgttgggcgggacggttcgcgaaccctttggtgggtttacgcgggcacgcacgctcccatcgcgggcgccatggcgggactgggcaagccctacaccggccacccaggtgacgccttcgagggtctcgttcagcgaattcggcttatcgtcccatctacgttgcggggcggggacggggaggcgggcccctactctccctccagcctcccctccaggtgcgcctttcagtttcatggccatgacgggtccgacgagtcgtttcccatcgagtatgtactgcggcttatgaacgactgggccgaggtcccgtgcaacccttacctgcgcatacagaacaccggcgtgtcggtgctgtttcaggggttttttcatcgcccacacaacgcccccgggggcgcgattacgccagagcggaccaatgtgatcctgggctccaccgagacgacggggctgtccctcggcgacctggacaccatcaaggggcggctcggcctggatgcccggccgatgatggccagcatgtggatcagctgctttgtgcgcatgccccgcgtgcagctcgcgtttcggttcatgggccccgaagatgccggacggacgagacggatcctgtgccgcgccgccgagcaggctattacccgtcgccgccgaacccggcggtcccgggaggcgtacggggccgaggccgggctgggggtggccggaacgggtttccgggccaggggggacggttttggcccgctccccttgttaacccaagggccctcccgcccgtggcaccaggccctgcggggtcttaagcacctacggattggcccccccgcgctcgttttggcggcgggactcgtcctgggggccgctatttggtgggtggttggtgctggcgcgcgcctataaaaaaggacgcaccgccgccctaatcgccagtgcgttccggacgccttcgccccacacagccctcccgaccgacacccccatatcgcttcccgacctccggtcccgatggccgtcccgcaatttcaccgccccagcaccgttaccaccgatagcgtccgggcgcttggcatgcgcgggctcgtcttggccaccaataactctcagtttatcatggataacaaccacccgcacccccagggcacccaaggggccgtgcgggagtttctccgcggtcaggcggcggcgctgacggaccttggtctggcccacgcaaacaacacgtttaccccgcagcctatgttcgcgggcgacgccccggccgcctggttgcggcccgcgtttggcctgcggcgcacctattcaccgtttgtcgttcgagaaccttcgacgcccgggaccccgtgaggcccggggagttccttctggggtgttttaatcaataaaagaccacaccaacgcacgagccttgcgtttaatgtcgtgtttattcaagggagtgggatagggttcgacggttcgaaacttaacacaccaaataatcgagcgcgtctagcccagtaacatgcgcacgtgatgtaggctggtcagcacggcgtcgctgtgatgaagcagcgcccggcgggtccgctgtaactgctgttgtaggcggtaacaggcgcggatcagtaccgccagggcgctacgaccggtgcgttgcacgtagcgtcgcgacagaactgcgtttgccgatacgggcggggggccgaattgtaagcgcgtcacctcttgggagtcatcggcggataacgcactgaatggttcgttggttatgggggagtgtggttccccagggagtgggtcgagcgcctcggcctcggaatccgagaggaacaacgaggtggcgtcggagtcttcgtcgtcagagacatacagggtctgaagcagcgacacgggcgggggggtagcgtcgatgtgtagcgcgagggaggatgcccacgaagacaccccagacaaggagctgcccgtgcgtggatttgtggaagacgcggaagccgggacggatgggcggttttgcggtgcccggaaccgaaccgccggatactccccgggtgctacatgcccgttttggggctggggttggggctggggttggggctggggttggggctggggttggggctggggttggggctggggttggggttggggttggggctggggttggggttggggctggggctggggctggggctggggctggggctggggctggggctggggctggggctggggctggggctggggctggggctggggctggggctggggttggggcgcggacaggcggctgacggtcaaatgcccccgggggcgcgcagatgtggtgggcgtggccaccggctgccgtgtagtggggcggcgggaaaccgggcctccgggcgcaacaccgccctccagcgtcaagtatgtggggggcgggcctgacgtcgggggcggggcgacgggttggaccgcgggaggcgggggagagggacctgcgggagaggatgaggtcggctcggccgggttgcggcctaaaacaggggccgtggggtcggcggggtcccagggtgaagggagggattcccgcgattcggacagcgacgcgacagcggggcgcgtaaggcgccgctgcggcccgcctacgggaaccctggggggggttggcgcgggacccgaggttagcggggggcggcggttttcgcccccgggcaaaaccgtgccggttgcgaccgggggcggaacgggatcgatagggagagcgggagaagcctggccggcggcctggggcccgagcgggaggggcacaccagacaccaaagcgtggggcgctggctctgggggtttgggaggggccggggggcgcgcgaaatcggtaaccggggcgaccgtgtcggggagggcaggcggccgccaaccctgggtggtcgcggaagcctgggtggcgcgcgccagggagcgtgcccggcggtgtcggcgcgcgcgcgacccggacgaagaagcggcagaagcgcgggaggaggcgggggggcggggggcggtggcatcggggggcgccggggaactttggggggacggcaagcgccggaagtcgtcgcgggggcccacgggcgccggccgcgtgctttcggccgggacgcccggtcgtgcttcgcgagccgtgactgccggcccagggggccgcggtgcacactgggacgtggggacggactgatcggcggtgggcgaaagggggtccggggcaaggaggggcgcggggccgccggagtcgtcagacgcgagctcctccaggccgtgaatccatgcccacatgcgaggggggacgggctcgccgggggtggcgtcggtgaatagcgtgggggccaggcttccgggccccaacgagccctccgccccaacaaggtccacagggccgggggtcgggttcgggaccgaggggctctggtcgtcgggggcgcgctggtacaccggatgccccgggaatagctcccccgacaggagggaggcgtcgaacggccgcccgaggatagctcgcgcgaggaaggggtcctcgtcggtggcgctggcggcgaggacgtcctcgccgcccgccacaaacgggagctcctcggtggcctcgctgccaacaaaccgcacgtcgggggggccgggggggtccgggttttcccacaacaccgcgaccggggtcatggagatgtccacgagcaccagacacggcgggccccgggcgaggggccgctcggcgatgagcgcggacaggcgcgggagctgtgccgccagacacgcgttttcgatcgggttcaggtcggcgtgcaggaggcggacggcccacgtctcgatgtcggacgacacggcatcgcgcaaggcggcgtccggcccgcgagcgcgtgagtcaaacagcgtgagacacagctccagctccgactcgcgggaaaaggccgtggtgttgcggagcgccacgacgacgggcgcgcccaggagcactgccgccagcaccaggtccatggccgtaacgcgcgccgcgggggtgcggtgggtggcggcggccggcacggcgacgtgctggcccgtgggccggtagagggcgttggggggagcggggggtgacgcctcgcgcccccccgaggggctcagcgtctgcccagattccagacgcgcggtcagaagggcgtcgaaactgtcatactctgtgtagtcgtccggaaacatgcaggtccaaagagcgaccagagcggtgcttgggagacacatgcgcccgaggacgctcaccgccgccagcgcctgggcgggactcagctttcccagcgcggcgccgcgctcggttcccagctcggggaccgagcgccagggcgccagggggtcggtttcggacaacttgccgcggcgccagtctgccagccgcgtgccgaacatgaggccccgggtcggagggcctccggccgaaaacgctggcagcacgcggatgcgggcgtctggatgcggggtcaggcgctgcacgaatagcatggaatctgctgcgttctgaaacgcacgggggagggtgagatgcatgtactcgtgttggcgaaccagatccaggcgccaaaaggtgtaaatgtgttccggggagctggccaccagcgccaccagcacgtcgttctcgttaaaggaaacgcggtgcctagtggagctctggggtccgagcggcggccccggggccgccgcgtcacccccccattccagctgggcccagcgacacccaaactcgcgcgtgagagtggtcgcgacgagggcgacgtagagctcggccgccgcatccatcgaggccccccatctcgcctggcggtggcgcacaaagcgtccgaagagctgaaagttggcggcctgggcgtcgctgagggccagctgaagccggttgatgacggtgaggacgtacatggccgtgacggtcgaggccgactccagggtgtccgtcggaagcggggggcgaatgcatgccgcctcgggacacatcagcagcgcgccgagcttgtcggtcacggccgggaagcagagcgcgtactgcagtggcgttccatccgggaccaaaaagctgggggcgaacggccgatccagcgtactggtggcctcgcgcagcaccaggggccccgggcctccgctcactcgcaggtacgcctcgccccggcggcgcagcatctgcgggtcggcctcttggccgggtggggcggacgcccgggcgcgggcgtctagggcgcgaagatccacgagcaggggcgcgggcgcggccgccgcgcccgcgcccgtctggcctgtggccttggcgtacgcgctatataagcccatgcggcgttggatgagctcccgcgcgccccggaactcctccaccgcccatggggccaggtccccggccaccgcgtcgaattccgccaacaggccccccagggtgtcaaagttcatctcccaggccacccttggcaccacctcgtcccgcagccgggcgctcaggtcggcgtgttgggccacgcgccccccgagctcctccacggccccggcccgctcggcgctcttggcgcccaggacgccctggtacttggcgggaaggcgctcgtagtcccgctgggctcgcagccccgacacagtgttggtggtgtcctgcagggcgcgaagctgctcgcatgccgcgcgaaatccctcgggcgatttccaggcccccccgcgaacgcggccgaagcgaccccatacctcgtcccactccgcctcggcctcctcgagagacctccgcagggcctcgacgcggcgacgggtgtcgaagagcgcctgcaggcgcgcgccctgtcgcgtcaggaggcccgggccgtcgccgctggccgcgcttagcgggtgcgtctcaaaggtacgctgggcatgttccaaccaggcgaccgcctgcacgtcgagctcgcgcgccttctccgtctggtccaccagaatttcgacctgatccgcgatctcctccgccgagcgcgcctggtccagcgtcttggccacggtcgccgggacggcgaccaccttcagcagggtcttcagattggccagaccctcggcctcgagctgggcccggcgctcgcgcgcggccagcacctcccgcagccccgccgtgacccgctcggtggcttcggcgcgctgctgtttggcgcgcaccacggcgtccttggtatcggccaggtcctgtcgggtcacgaatgcgacgtagtcggcgtacgccgtgtccttcacggggctctggtccacgcgctccagcgccgccacgcacgccaccagcgcgtcctcgctcgggcagggcagggtgacccctgcccggacaagctcggcggccgccgccgggtcgttgcgcaccgcggatatctcctccgcggcggcggccaggtccagcgccacgcttccgatcgcgcgccgcgcgtcggcccggagggcgtccaggcgatcgcggatatccacgtactcggcgtagcccttttgaaaaaacggcacgtactggcgcagggccggcacgccccccaagtcttccgacaggtgtaggacggcctcgtggtagtcgataaacccgtcgttcgcctgggcccgctccagcagcccccccgccagccgcagaagccgcgccaggggctcggtgtccacccgaaacatgtcggcgtacgtgtcggccgcggccccgaaggccgcgctccagtcgatgcggtgaatggctgcgagcggggggagcatggggtggcgctggttctcgggggtgtatgggttaaacgcaagggccgtctccagggcaagggtcaccgccttggcgttggttcccagcgcctgttcggcccgctttcggaagtcccgggggttgtagccgtgcgtgcccgccagcgcctgcaggcgacggagctcgaccacgtcaaactcggcaccgctttccacgcggtccagcacggcctccacgtcggcggcccagcgctcgtggctactgcgggcgcgctgggccgccatcttctctctgaggtcggcggtggcggcctcaagttcgtcggcgcggcgtcgcgtggcgccgatgacctttcccagctcctgcagggcgcgcccgctgggggagtggtccccggccgtcccttcggcgtgcaacaggcccccgaacctgccctcgtggcccgcgaggctttcccgcgcgccggtggtcgcgcgcgtcgcggcctggatcagggaggcatgctctccctccggttggttggcggcccggcgcacctggacgacaaggtcggcggcagccgaccctaaggtcgtgagctgggcgatggccacccgcgcgtccagggccaaccgagtcgccttgacgtatcccgcggcgctgtcggccatggccgctaggaaggccaggggggaggccgggtcgctggcggccgcgcccagggccgtcaccgcgtcgaccaggacgcggtgcgcccgcacggccgcatccaccgtcgacgcagggtctgccgttgcgacggcggcgctgccggcgttgatggcgttcgagacggcgtgggctatgatcggggcgtgatcggcgaagaactgcaagagaaacggagtctctggggcgtcggcgaacaggttcttcagcaccaccacgaagctgggatgcaagccagacagagccgtcgccgtgtccggagtcgggtgctccagggcatctcggtactgccccagcagcccccacatgtccgcccgcagcgccgccgtaacctcagggggcgccccccgaacggcctcggggaggtccgaccagcccgccggcagggaggcccgcagggtcgccaggacggccggacaggcctttagccccacaaagtcagggagggggcgcaggaccccctggagtttgtgcaagaacttctcccgggcgtcgcgggccaccttcgcccgctcccgcgctccctcgagcattgcctccagggagcgcgcgcgctcccgcaaacgggcacgcgcatcgggggcgagctctgccgtcagcttggcggcatccatggcccgcgcctgccgcagcgcttcctcggccatgcgcgtggcctctggcgacagcccgccgtcgtcggggtagggcgacgcgccgggcgcaggaacaaaggccgcgtcgctgtccagctgctggcccagggccgcatctagggcgtcgaagcgccgcagctcggccagacccgagctgcggcgcgcctgttggtcgttaatgtcgcggatgctgcgcgccagctcgtccagtggcttgcgttctatcagcccttggttggcggcgtccgtcaggacggagagccaggccgccaggtcctcgggggcgtccagcgtctggccccgctggatcagatcccgcaacaggatggccgtggggctggtcgcgatcgggggcggggcgggaatggcggcgcgctgcgcgatgtcccgcgtgtgctggtcgaagacaggcagggactcgagcagctggaccacgggcacgacggcggccgaagccacgtgaaaccggcggtcgttgttgtcgctggcctgtagagccttggcgctgtatacggccccccggtaaaagtactccttaaccgcgccctcgatcgcccgacgggcctgggtccgcacctcctccagccgaacctgaacggcctcggggcccagggggggtgggcgcggagccccctgcggggccgccccggccggggcgggcattacgccgaggggcccggcgtgctgtgagaccgcgtcgaccccgcgagcgagggcgtcgagggcctcgcgcatctggcgatcctccgcctccaccctaatctcttcgccacgggcaaatttggccagagcctggactctatacagaagcggttctgggtgcgtcggggtggcgggggcaaaaagggtgtccgggtgggcctgcgagcgctccagaagccactcgccgaggcgtgtatacagattggccggcggggccgcgcgaagctgcagctccaggtccgcgagttccccgtaaaaggcgtccgtctcccgaatgacatccctagccacaaggatcagcttcgccagcgccaggcgaccgatcagagagttttcgtccagcacgtgctggacgaggggcagatgggcggccacgtcggccaggctcaggcgcgtggaggccagaaagtcccccacggccgttttccagggcagcatgttcagggtaaactccagcagggcggcggccgggccggccaccccggcctgggtgtgcgtccgggccccgttctcgatgagaaaggcgaggacgcgttcaaagaaaaaaataacacagagctccagcagccccggagaggccggatacggcgaccgtaaggcgctgatggtgagccgcgaacacgcggcgacctcgcgggccagggcggcggagcacgcggtgaacttaaccgccgtggcggccacgtttgggtgggcctcgaacagctgggcgaggtctgcgcccgggggctcgggcgagcggcgagtcttcagcgcctcgagggcctgtgaggacgccggaaccgtgggcccgtcgtcctcgcccgcctcggcgaccggcggcccggccgggtcggggggtgccgaggcgaggacaggctccggaacggaggcggggaccgcggccccgacgggggttttgcctttgggggtggatttcttcttggttttggcagggggggccgagcgtttcgttttctcccccgaagtcaggtcttcgacgctggaaggcggagtccaggtgggtcggcggcgcttgggaaggccggccgagtagcgtgcccggtgccgaccaaccgggacgacgcccatctccaggacccgcatgtcgtcgtcatcttcttcggccgcctctgcggcgggggtcttgggggcggagggaggcggtggtgggatcgcggagggtgggtcggcggagggtgggtcggcggaggggggatccgtgggtggggtacccttcagggccaccgcccatacatcgtcgggcgcccgattcgggcgcttggcctctggttttgccgacggaccggccgtcccccgggatgtctcggaggccctgtcgtcgcgacgggcccgggtcggtggcggcgactgggcggctgtgggcgggtgtggccccgggccccctaccccctcccgggggcccacgccgacgcagggctcccccaggcccgcgatctcgccccgcagggggtgcgtgatggccacgcgccgttcgctgaacgcttcgtcctgcaggtaagtctcgctggccccgtaaagatgcagagccgcggccgtcaagtccgcaggagccgcgggttccgggcccgacggcacgaaaaacaccatggctcccgcccaccgtacgtccgggcgatcgcgggtgtaatacgtcaggtatggatacatgtcccccgcccgcactttggcgatgaacgcgggggtgccctccggaaggccgtgcgggtcaaaaaggtatgcggtgtcgccgtccctgaacagccccatccctagggggccaatggttaggagcgtgtacgacagggggcgcagggcccacgggccggcgaagaacgtgtgtgcggggcattgtgtctccagcaggcccgccgcgggctccccgaagaagcccacctcgccgtatacgcgcgagaagacacagcgcagtccgccgcgcgcccctgggtactcgaggaagttggggagctcgacgatcgaacacatgcgcggcggcccagggcccgcggtcgcgcgcgtccactcgcccccctcgaccaaacatccctcgatggcctccgcggacaggacgtcgcgagggcccacatcaaatatgaggctgagaaaggacagcgacgagcgcatgcacgataccgacccccccggctccaggtcgggcgcgaactggttccgagcaccggtgaccacgatgtcgcgatcccccccgcgttccatcgtggagtgcggtggggtgcccgcgatcatatgtgccctgctggccagagacccggcctgtttatggaccggacccccggggttagtgttgtttccgccacccatgcccccgtaccatggccccggttcccctgattaggctacgagtcgcggtgatcgcttcccaaaaaccgagctgcgtttgtctgtcttggtcttccacccccccccccgcccgcccgcacaccataacaccgagaacaacacacgggggtgggcgtaacataataaagctttattggtaactagttaacggcaagtccgtgggtggcgcgacggtgtcctccgggatcatctcgtcgtcctcgacgggggtgttggaatgaggcgccccctcgcggtccgcctggcgtgggccgtgcccataggcctccggcttctgtgcgtccatgggcataggcgcggggagactgtttccggcgtcgcggacctccaggtccctgggagactccggtccggctaacggacgaaacgcggaagcgcgaaacacgccgtcggtgacccgcaggagctcgttcatcagtaaccaatccatactcagcgtaacggccagcccctggcgagacagatccacggagtccggaaccgcggtcgtctggcccagggggccgaggctgtagtccccccaggcccctaggtcgcgacggctcgtaagcacgacgcggtcggccgcggggctttgcgggggggcgtcctcgggcgcatgcgccattacctctcggatggccgcggcgcgctggtcggccgagctgaccaagggcgccacgaccacggcgcgctccgtctgcaggcccttccacgtgtcgtggagttcctggacaaactcggccacgggctcgggtcccgcggccgcgcgcgcggcttgatagcaggccgacagacgccgccagcgcgctagaaactgacccatgaagcaaaacccggggacctggtctcccgacagcagcttcgacgcccgggcgtgaatgccggacacgacggacagaaacccgtgaatttcgcgccggaccacggccagcacgttgtcctcgtgcgacacctgggccgccagctcgtcgcacacccccaggtgcgccgtggtttcggtgatgacggaacgcaggctcgcgagggacgcgaccagcgcgcgcttggcgtcgtgatacatgctgcagtactgactcaccgcgtcccccatggcctcggggggccagggccccaggcggtcgggcgtgtccccgaccaccgcatacaggcggcgcccgtcgctctcgaaccgacactcgaaaaaggcggagagcgtgcgcatgtgcagccgcagcagcacgatggcgtcctccagttggcgaatcagggggtctgcgcgctcggcgaggtcctgcagcaccccccgggcggccagggcgtacatgctaatcaacaggaggctggtgcccacctcggggggcggggggggctgcagctggaccaggggccgcagctgctcgacggcacccctggagatcacgtacagctcccggagcagctgctctatgttgtcggccatctgcatagtggggccgaggccgccccgggcggccggttcgaggagggtgatcagcgcgcccagtttggtgcgatggccctcaaccgtggggagatagcccagcccaaagtcccgggcccaggccaacacacgcagggcgaactcgaccgggcggggaaggtaggccgcgctacacgtggccctcagcgcgtccccgaccaccagggccagaacgtaggggacgaagcccgggtcggcgaggacgttggggtgaatgccctcgagggcggggaagcggatctgggtcgccgcggccaggtggacagagggggcgtggctgggctgcccgacggggagaagcgcggacagcggcgtggccggggtggtgggggtgatgtcccagtgggtctgaccatacacgtcgatccagatgagcgccgtctcgcggagaaggctgggttgaccggaactaaagcggcgctcggccgtctcaaactcccccacgagcgcccgccgcaggctcgccagatgttccgtcggcacggccggacccatgatacgcgccagcgtctggcttagaacgccccccgacaggccgaccgcctcgcagagccgcccgtgcgtgtgctcgctggcgccctggacccgcctgaaagtttttacgtagttggcatagtacccgtattcccgcgccaacccaaacacgttcgaccccgcgagggcaatgcacccaaagagctgctggacttcgccgagtccgtggccggtgggcgtccgcgcggggacgcccgccgccagaaacccctccagggccgaaaggtagtgcgtgcagtgcgagggcgtgaacccagcgtcgatcagggtgttgatcaccacggagggcgaattggtattctggatcaacgtccacgtctgctgcagcagagccagcagccgctgctgggcgccggcggagggctgctccccgagctgcagcaggctggagacggcaggctggaagactgccagtgccgacgaactcaggaacggcacgtcgggatcaaacacggccacgtccgtccgcacgcgcgccattagcgtccccgggggcgcacaggccgagcgcgggctgacgcggctgagggccgtcgacacgcgcacctcctcgcggctgcgaaccatcttgttggcctcgagcggcggaatcattatggccgggtcgatctcccgcacggtgtgctgaaactgcgccaacaggggcggcgggaccacagccccccgctcgggggtcgtcaggtactcgtccaccagggccaacgtaaagagggcccgtgtgaggggagtgagggtcgcgtcgtctatgcgctggaggtgcgccgagaacagcgtcacccgattactcaccagggccaagaaccggaggccctcttgcacgaacggggcggggaagagcaggctgtacgccggggtggtaaggttcgcgctgggctgccccaacgggaccggcgccatcttgagcgacgtctccccaagggcctcgatggaggtccgcgggctcatggccaagcagctcttggtgacggtttgccagcggtctatccactccacggcgcactggcggacgcggaccggccccagggccgccgcggtgcgcaggccggcggaatccagcgcatgggacgtgtcggagccggtgaccgcgaggatggtgtccttgatgacctccatctcccggaaggcctggtcgggggcctcggggagagccaccaccaagcggtgtacgagcaacccggggaggttctcggccaagagcgccgtctccggaagcccgtgggcccggtggagcgcgcacaggtgttccagcagcggccgccagcatgcccgcgcgtctgccggggcgatggccgttcccgacaacagaaacgccgccatggcggcgcgcagcttggccgtggccagaaacgccgggtcgtccgccccgtttgccgtctcggccgtgggggttggcggttggcgaaggccggctaggctcgccaataggcgctgcataggtccgtccgagggcggaccggcgggtgaggtcgtgacgacgggggcctcggacgggagaccgcggtctgccatgacgcccggctcgcgtgggtgggggacagcgtagaccaacgacgagaccgggcgggaatgactgtcgtgcgctgtagggagcggcgaattatcgatcccccgcggccctccaggacccccgcaggcgttgcgagtaccccgcgtcttcgcggggtgttatacggccacttaagtcccggcatcccgttcgcggacccaggcccgggggattgtccggatgtgcgggcagcccggacggcgtgggttgcggactttctgcggggcggcccaaatggccctttaaacgtgtgtatacggacgcgccgggccagtcggccaacacaacccaccggaggcggtagccgcgtttggctgtggggtgggtggttccgccttgcgtgagtgtcctttcgacccccccccccctccctcccccgggtcttgctaggtcgcgatctggggtcgcaatgaagaccaatccgctacccgcaaccccttccgtgtggggcgggagtaccgtggaactcccccccacaacacgcgataccgcgggacagggcctgcttcggcgcgtcctgcgccccccgatctctcgccgcgacggcccagggctccccagggggtcgggaccccggagggcggccagcacgctgtggttgcttggcctggacggcacagacgcgccccctggggcgctgacccccaacgacgataccgaacaggccctggacaagatcctgcggggcaccatgcgcgggggggcggccctgatcggctccccgcgccatcatctaacccgccaagtgatcctgacggatctgtgccaacccaacgcggatcgtgctgggacgctgcttctggcgctgcggcaccccgccgacctgcctcacctggcccaccagcgcgccccgccaggccggcagaccgagcggctgggcgaggcctggggccagctgatggaggcgaccgccctggggtcggggcgagccgagagcgggtgcacgcgcgcgggcctagtgtcgtttaacttcctggtggcggcgtgtgccgcctcgtacgacgcgcgcgacgccgccgatgcggtacgggcccacgtcacggccaactaccgcgggacgcgggtgggggcgcgcctggatcgtttttccgagtgtctgcgcgccatggttcacacgcacgtcttcccccacgaggtcatgcggtttttcggggggctggtgtcgtgggtcacccaggacgagctagcgagcgtcaccgccgtgtgcgccgggccccaggaggcggcgcacaccggccacccgggccggccccgctcggccgtgatcctcccggcatgtgcgttcgtggacctggacgccgagctggggctggggggcccgggcgcggcgtttctgtacctggtattcacttaccgccagcgccgggaccaggagctgtgttgtgtgtacgtgatcaagagccagctccccccgcgcgggttggagccggccctggagcggctgtttgggcgcctccggatcaccaacacgattcacggcaccgaggacatgacgcccccggccccaaaccgaaaccccgacttccccctcgcgggcctggccgccaatccccaaaccccgcgttgctcggctggccaggtcacgaacccccagttcgccgacaggctgtaccgctggcagccggacctgcgggggcgccccaccgcacgcacctgtacgtacgccgcctttgcagagctcggcatgatgcccgaggatagtccccgctgcctgcaccgcaccgagcgctttggggcggtcagcgtccccgttgtcattctggaaggcgtggtgtggcgccccggcgagtggcgggcatgcgcgtgagcgtagcaaacgccccgcccacacaacgctccgcccccaaccccttccccgctgtcactcgttgttcgttgacccgggcgtccgccaaataaagccactgaaacccgaaacgcgagtgttgtaacgtcctttgggcgggaggaagccacaaaatgcaaatgggatacatggaaggaacacacccccgtgactcaggacatcggtgtgtccttttgggtttcactgaaactggcccgcgccccacccctgcgcgatgtggataaaaagccagcgcgggtggtttagggtaccacaggtgggtgctttggaaacttgccggtcgccgtgctcctgtgagcttgcgtccctccccggtttcctttgcgctcccgccttccggacctgctctcgcctatcttctttggctctcggtgcgattcgtcaggcagcggccttgtcgaatctcgaccccaccactcgccggacccgccgacgtcccctctcgagcccgccgaaacccgccgcgtctgttgaaatggccagccgcccagccgcatcctctcccgtcgaagcgcgggccccggttgggggacaggaggccggcggccccagcgcagccacccagggggaggccgccggggcccctctcgcccacggccaccacgtgtactgccagcgagtcaatggcgtgatggtgctttccgacaagacgcccgggtccgcgtcctaccgcatcagcgatagcaactttgtccaatgtggttccaactgcaccatgatcatcgacggagacgtggtgcgcgggcgcccccaggacccgggggccgcggcatcccccgctcccttcgttgcggtgacaaacatcggagccggcagcgacggcgggaccgccgtcgtggcattcgggggaaccccacgtcgctcggcggggacgtctaccggtacccagacggccgacgtccccaccgaggcccttgggggcccccctcctcctccccgcttcaccctgggtggcggctgttgttcctgtcgcgacacacggcgccgctctgcggtattcgggggggagggggatccagtcggccccgcggagttcgtctcggacgaccggtcgtccgattccgactcggatgactcggaggacacggactcggagacgctgtcacacgcctcctcggacgtgtccggcggggccacgtacgacgacgcccttgactccgattcgtcatcggatgactccctgcagatagatggccccgtgtgtcgcccgtggagcaatgacaccgcgcccctggatgtttgccccgggacccccggcccgggcgccgacgccggtggtccctcagcggtagacccacacgcgccgacgccagaggccggcgctggtcttgcggccgatcccgccgtggcccgggacgacgcggaggggctttcggacccccggccacgtctgggaacgggcacggcctaccccgtccccctggaactcacgcccgagaacgcggaggccgtggcgcgctttctgggagatgccgtgaaccgcgaacccgcgctcatgctggagtacttttgccggtgcgcccgcgaggaaaccaagcgtgtcccccccaggacattcggcagcccccctcgcctcacggaggacgactttgggcttctcaactacgcgctcgtggagatgcagcgcctgtgtctggacgttcctccggtcccgccgaacgcatacatgccctattatctcagggagtatgtgacgcggctggtcaacgggttcaagccgctggtgagccggtccgctcgcctttaccgcatcctgggggttctggtgcacctgcggatccggacccgggaggcctcctttgaggagtggctgcgatccaaggaagtggccctggattttggcctgacggaaaggcttcgcgagcacgaagcccagctggtgatcctggcccaggctctggaccattacgactgtctgatccacagcacaccgcacacgctggtcgagcgggggctgcaatcggccctgaagtatgaggagttttacctaaagcgttttggcgggcactacatggagtccgtcttccagatgtacacccgcatcgccggctttttggcctgccgggccacgcgcggcatgcgccacatcgccctggggcgagaggggtcgtggtgggaaatgttcaagttctttttccaccgcctctacgaccaccagatcgtaccgtcgacccccgccatgctgaacctggggacccgcaactactacacctccagctgctacctggtaaacccccaggccaccacaaacaaggcgaccctgcgggccatcaccagcaacgtcagtgccatcctcgcccgcaacgggggcatcgggctatgcgtgcaggcgtttaacgactccggccccgggaccgccagcgtcatgcccgccctcaaggtccttgactcgctggtggcggcgcacaacaaagagagcgcgcgtccgaccggcgcgtgcgtgtacctggagccgtggcacaccgacgtgcgggccgtgctccggatgaagggggtcctcgccggcgaagaggcccagcgctgcgacaatatcttcagcgccctctggatgccagacctgtttttcaagcgcctgattcgccacctggacggcgagaagaacgtcacatggaccctgttcgaccgggacaccagcatgtcgctcgccgactttcacggggaggagttcgagaagctctaccagcacctcgaggtcatggggttcggcgagcagatacccatccaggagctggcctatggcattgtgcgcagtgcggccacgaccgggagccccttcgtcatgttcaaagacgcggtgaaccgccactacatctacgacacccagggggcggccatcgccggctccaacctctgcaccgagatcgtccatccggcctccaagcgatccagtggggtctgcaacctgggaagcgtgaatctggcccgatgcgtctccaggcagacgtttgactttgggcggctccgcgacgccgtgcaggcgtgcgtgctgatggtgaacatcatgatcgacagcacgctacaacccacgccccagtgcacccgcggcaacgacaacctgcggtccatgggaatcggcatgcagggcctgcacacggcctgcctgaagctggggctggatctggagtctgccgaatttcaggacctgaacaaacacatcgccgaggtgatgctgctgtcggcgatgaagaccagcaacgcgctgtgcgttcgcggggcccgtcccttcaaccactttaagcgcagcatgtatcgcgccggccgctttcactgggagcgctttccggacgcccggccgcggtacgagggcgagtgggagatgctacgccagagcatgatgaaacacggcctgcgcaacagccagtttgtcgcgctgatgcccaccgccgcctcggcgcagatctcggacgtcagcgagggctttgcccccctgttcaccaacctgttcagcaaggtgacccgggacggcgagacgctgcgccccaacacgctcctgctaaaggaactggaacgcacgtttagcgggaagcgcctcctggaggtgatggacagtctcgacgccaagcagtggtccgtggcgcaggcgctcccgtgcctggagcccacccaccccctccggcgattcaagaccgcgtttgactacgaccagaagttgctgatcgacctgtgtgcggaccgcgccccctacgtcgaccatagccaatccatgaccctgtatgtcacggagaaggcggacgggaccctcccagcctccaccctggtccgccttctggtccacgcatataagcgcggactaaaaacagggatgtactactgcaaggttcgcaaggcgaccaacagcggggtctttggcggcgacgacaacattgtctgcatgagctgcgcgctgtgaccgacaaaccccctccgcgccaggcccgccgccactgtcgtcgccgtcccacgctctcccctgctgccatggattccgcggccccagccctctcccccgctctgacggcccttacgggccagagcgcgacggcggacctggcgatccagattccaaagtgccccgaccccgagaggtacttctacacctcccagtgtcccgacattaaccacctgcgctccctcagcatccttaaccgctggctggaaaccgagcttgttttcgtgggggacgaggaggacgtctccaagctttccgagggcgagctcagcttttaccgcttcctcttcgctttcctgtcggccgccgacgacctggttacggaaaacctgggcggcctctccggcctgtttgagcagaaggacattctccactactacgtggagcaggaatgcatcgaagtcgtacactcgcgcgtgtacaacatcatccagctggtgcttttccacaacaacgaccaggcgcgccgcgagtacgtggccggtaccatcaaccacccggccatccgcgccaaggtggactggttggaagcgcgggtgcgggaatgcgcctccgttccggaaaagttcattctcatgatcctcatcgagggcatcttttttgccgcctcgtttgccgccatcgcctaccttcgcaccaacaaccttctgcgggtcacctgccagtcaaacgacctcatcagccgggacgaggccgtgcacacgacggcctcgtgttacatctacaacaactacctcggcgggcacgccaagcccccgcccgaccgcgtgtacgggctgttccgccaggcggtcgagatcgagatcggatttatccgatcccaggcgccgacggacagccatatcctgagcccggcggcgctggcggccatcgaaaactacgtgcgattcagcgcggatcgcctgttgggccttatccacatgaagccactgttttccgccccaccccccgacgccagctttccgctgagcctcatgtccaccgacaaacacaccaattttttcgagtgtcgcagcacctcctacgccggggcggtcgtcaacgatctgtgagtgtcgcggcgcgcttctacccgtgtttgcccataataaacctctgaaccaaactttgggtctcattgtgattcttgtcagggacgcgggggtgggagaggataaaaggcggcgcaaaaagcagtaaccaggtccgtccagattctgcgggcataggataccataattttattggtgggtcgtttgttcggggacaagcgcgctcgtctgacgtttgggctactcgtcccagaatttggccaggacgtccttgtagaacgcgggtgggggggcctgggtccgcaactgctccagaaacctgtcggcgatatcaggggccgtgatatgccgggtcacgatagatcgcgccaggttttcgtcgcggatgtcctggtagataggcaggcgtttcagaagagtccacggcccccgctccttggggccgataagcgatatgacgtacttaatgtagcggtgttccaccagctcggtgatggtcatgggatcggggagccagtccagggactctggggcgtcgtggatgacgtggcgtcgccggttggccacataactgcggtgctcttccagcagctgcgcgttcgggacctggacgagctcgggcggggtgagtatctccgaggaggacgacctggggccggggtggcccccggtaacgtcccggggatccagggggaggtcctcgtcgtcttcgtatccgccggcgatctgttgggttagaatttcggtccacgagacgcgcgtctcggtgccgccggcggccggcggcagagggggcctggtttccgtggagcgcgagctggtgtgttcccggcggatggcccgccgggtctgagagcgactcgggggggtccagtgacattcgcgcagcacatcctccacggaggcgtaggtgttattgggatggaggtcggtgtggcagcggacaaagagggccaggaactgggggtagctcatcttaaagtactttagtatatcgcgacagttgatcgtgggaatgtagcaggcgctaatatccaacacaatatcacagcccatcaacaggaggtcagtgtccgtggtgtacacgtacgcgaccgtgttggtgtgatagaggttggcgcaggcatcgtccgcctccagctgacccgagttaatgtaggcgtaccccagggcccggagaacgcgaatacagaacagatgcgccagacgcagggccggcttcgagggcgcggcggacggcagcgcggctccggacccggccgtcccccgggtccccgaggccagagaggtgccgcgccggcgcatgttggaaaaggcagagctgggtctggagtcggtgatgggggaaggcggtggagaggcgtccacgtcactggcctcctcgtccgtccggcactgggccgtcgtgcgggccaggatggccttggctccaaacacaaccggctccatacaattgaccccgcgatcggtaacgaagatggggaaaagggacttttgggtaaacacctttaataagcgacagaggcagtgtagcgtaatggcctcgcggtcgtaactggggtatcggcgctgatatttgaccaccaacgtgtacatgacgttccacaggtccacggcaatgggggtgaagtacccggccggggccccaaggccccggcgcttgaccagatggtgtgtgtgggcaaacttcatcatcccgaacaaacccatgtcaggtcaattgtaactgcggatcggcctaactaaggcgtggttggtgcgacggtccgggacacccgagcctgtctctctgtgtatggtgacccagacaacaacaccgacacaagaggacaataatccgttaggggacgctctttataatttcgatggcccaactccacgcggattggtgcagcaccctgcatgcgccggtgcgggccaaccttccccccgctcattgcctcttccaaaagggtgtggcctaacgagctgggggcgtatttaatcaggctagcgcggcgggcctgccgtagtttctggctcggtgagcgacggtccggttgcttgggtcccctggctgccatcaaaaccccaccctcgcagcggcatacgccccctccgcgtcccgcacccgagaccccggcccggctgccctcaccaccgaagcccacctcgtcactgtggggtgttcccagcccgcgttgggatgacggattcccctggcggtgtggcccccgcctcccccgtggaggacgcgtcggacgcgtccctcgggcagccggaggagggggcgccctgccaggtggtcctgcagggcgccgaacttaatggaatcctacaggcgtttgccccgctgcgcacgagccttctggactcgcttctggttatgggcgaccggggcatccttatccataacacgatctttggggagcaggtgttcctgcccctggaacactcgcaattcagtcggtatcgctggcgcggacccacggcggcgttcctgtctctcgtggaccagaagcgctccctcctgagcgtgtttcgcgccaaccagtacccggacctacgtcgggtggagttggcgatcacgggccaggccccgtttcgcacgctggttcagcgcatatggacgacgacgtccgacggcgaggccgttgagctagccagcgagacgctgatgaagcgcgaactgacgagctttgtggtgctggttccccagggaacccccgacgttcagttgcgcctgacgaggccgcagctcaccaaggtccttaacgcgaccggggccgatagtgccacgcccaccacgttcgagctcggggttaacggcaaattttccgtgttcaccacgagtacctgcgtcacctttgctgcccgcgaggagggcgtgtcgtccagcaccagcacccaggtccagatcctgtccaacgcgctcaccaaggcgggccaggcggccgccaacgccaagacggtgtacggggaaaatacccatcgcaccttctctgtggtcgtcgacgattgcagcatgcgggcggtgctccggcgactgcaggtcggcgggggcaccctcaagttcttcctcacgacccccgtccccagtctgtgcgtcaccgccaccggtcccaacgcggtatcggcggtatttctcctgaaaccccagaagatttgcctggactggctgggtcatagccaggggtctccttcagccgggagctcggcctcccgggcctctgggagcgagccaacagacagccaggactccgcgtcggacgcggtcagccacggcgatccggaagacctcgatggcgctgcccgggcgggagaggcgggggccttgcatgcctgtccgatgccgtcgtcgaccacgcgggtcactcccacgaccaagcgggggcgctcggggggcgaggatgcgcgcgcggacacggccctaaagaaacctaagacggggtcgcccaccgcacccccgcccgcagatccagtccccctggacacggaggacgactccgatgcggcggacgggacggcggcccgtcccgccgctccagacgcccggagcggaagccgttacgcgtgttactttcgcgacctcccgaccggagaagcaagccccggcgccttctccgccttccgggggggcccccaaaccccgtatggttttggattcccctgacggggcggggccttggcggccgcccaactctcgcaccatcccgggttaatgtaaataaacttggtattgcccaacactttcccgcgtgtcgcgtgtggttcatgtgtgtgcctggcgcccccaccctcgggttcgtgtatttcctttccctgtccttataaaagccgtatgtggggcgctgacggaaccaccccgcgtgccatcacggccaaggcgcgggatgctccgcaacgacagccaccgggccgtgtccccggaggacggccagggacgggtcgacgacggacggccacacctcgcgtgcgtgggggccctggcgcgggggttcatgcatatctggcttcaggccgccacgctgggttttgcgggatcggtcgttatgtcgcgcgggccgtacgcgaatgccgcgtctggggcgttcgccgtcgggtgcgccgtgctgggctttatgcgcgcaccccctcccctcgcgcggcccaccgcgcggatatacgcctggctcaaactggcggccggtggagcggcccttgttctgtggagtctcggggagcccggcacgcagccgggggccccggccccgggcccggccacccagtgcctggcgctgggcgccgcctatgcggcgctcctggtgctcgccgatgacgtctatccgctctttctcctcgccccggggcccctgttcgtcggcaccctggggatggtcgtcggcgggctgacgatcggaggcagcgcgcgctactggtggatcggtgggcccgccgcggccgccctggccgcggcggtgttggcgggcccgggggcgaccaccgccagggactgcttttccagggcttgccccgaccaccgccgcgtctgtgtcatcaccgcaggcgagtctctttcccgccgccccccggaggacccagagcgacccggggttcccgggcccccgtcccccccgaccccccaacgatcccacgggccgccggccgatgaggtcgcaccggccagggtcgcgcggcccgaaaacgtctgggtgcccgtggtcacctttctgggggcgggcgcgcttgccgtcaagacggtgcgagaacatgcccggggaacgccgggcccgggcctgccgctgtggccccaggtgtttctcggaggccatgtggcggtggccctgacggagctgtgtcaggcgcttgcgccctgggaccttacggacccgctgctgtttgttcacgccggactgcaggtcatcaacctcgggttggtgtttcggttttccgaggttgtcgtgtatgcggcgctagggggtgccgtgtggatttcgttggcgcaggtgctggggctccggcgtcgcctgcacaggaaggaccccggggacggggcccggttggcggcgacgcttcggggcctcttcttctccgtgtacgcgctggggtttggggtgggggtgctgctgtgccctccggggtcaacgggcgggcggtcgggcgattgatatatttttcaataaaaggcattagtcccgaagaccgccggtgtgtgatgatttcgccataacacccaaaccccggatggggcccgggtataaattccggaaggggacacgggctaccctcactatcgagggcgcttggtcgggaggccgcatcgaacgcacacccccatccggtggtccgtgtggaggtcgttttcagtgcccggtctcgctttgccgggaacgctagccgatccctcgcgagggggaggcgtcgggcatggccccggggcgggtgggccttgccgtggtcctgtggagcctgttgtggctcggggcgggggtgtccgggggctcggaaactgcctccaccgggcccacgatcaccgcgggagcggtgacgaacgcgagcgaggcccccacatcggggtcccccgggtcagccgccagcccggaggtcacccccacatcgaccccaaaccccaacaatgtcacacaaaacaaaaccacccccaccgagccggccagccccccaacaacccccaagcccacctccacgcccaaaagcccccccacgtccacccccgaccccaaacccaagaacaacaccacccccgccaagtcgggccgccccactaaaccccccgggcccgtgtggtgcgaccgccgcgacccattggcccggtacggctcgcgggtgcagatccgatgccggtttcggaattccacccgcatggagttccgcctccagatatggcgttactccatgggtccgtcccccccaatcgctccggctcccgacctagaggaggtcctgacgaacatcaccgccccacccgggggactcctggtgtacgacagcgcccccaacctaacggacccccacgtgctctgggcggagggggccggcccgggcgccgaccctccgttgtattctgtcaccgggccgctgccgacccagcggctgattatcggcgaggtgacgcccgcgacccagggaatgtattacttggcctggggccggatggacagcccgcacgagtacgggacgtgggtgcgcgtccgcatgttccgccccccgtctctgaccctccagccccacgcggtgatggagggtcagccgttcaaggcgacgtgcacggccgccgcctactacccgcgtaaccccgtggagtttgtctggttcgaggacgaccaccaggtgtttaacccgggccagatcgacacgcagacgcacgagcaccccgacgggttcaccacagtctctaccgtgacctccgaggctgtcggcggccaggtccccccgcggaccttcacctgccagatgacgtggcatcgcgactccgtgacgttctcgcgacgcaatgccaccgggctggccctggtgctgccgcggccaaccatcaccatggaatttggggtccggcatgtggtctgcacggccggctgcgtccccgagggcgtgacgtttgcctggttcctgggggacgacccctcaccggcggctaagtcggccgttacggcccaggagtcgtgcgaccaccccgggctggctacggtccggtccaccctgcccatttcgtacgactacagcgagtacatctgtcggttgaccggatatccggccgggattcccgttctagaacaccacggcagtcaccagcccccacccagggaccccaccgagcggcaggtgatcgaggcgatcgagtgggtggggattggaatcggggttctcgcggcgggggtcctggtcgtaacggcaatcgtgtacgtcgtccgcacatcacagtcgcggcagcgtcatcggcggtaacgcaagacccccccgttacctttttaatatctatatagtttggtcccccctctatcccgcccaccgctgggcgctataaagccgccaccctctcttccctcaggtcatccttggtcgatcccgaacgacacacggcgtggagcaaaacgcctccccctgagccgctttcctaccaacacaacggcatgcctctgcgggcatcggaacacgcctaccggcccctgggccccgggacaccccccatgcgggctcggctccccgccgcggcctgggttggcgtcgggaccatcatcgggggagttgtgatcattgccgcgttggtcctcgtgccctcgcgggcctcgtgggcactttccccatgcgacagcggatggcacgagttcaacctcgggtgcatatcctgggatccgacccccatggagcacgagcaggcggtcggcggctgtagcgccccggcgaccctgatcccccgcgcggctgccaaacagctggccgccgtcgcacgcgtccagtcggcaagatcctcgggctactggtgggtgagcggagacggcattcgggcctgcctgcggctcgtcgacggcgtcggcggtattgaccagttttgcgaggagcccgcccttcgcatatgctactatccccgcagtcccgggggctttgttcagtttgtaacttcgacccgcaacgcgctggggctgccgtgaggcgcgtgtactgcggtctgtctcgtctcctcttctccccttccctccccctccgcatcccaggatcacaccggtcaacgagggttgggggggtccggcacggacccaaaataataaacacacaatcacgtgcgataaaaagaacacgcggtcccctgtggtgtttttggttatttttattaaatctcgtcgacaaacagggggaaaggggcgtggtctagcgacggcagcacgggcggaggcgttcaccggctccggcgtccttcgcgtttaagcttggtcaggagggcgctcagggcggcgacgttggtcgggccgtcgttggtcagggcgttggctcgatggcgggcgaggacgggcgaggggctcaacggcgggggcgggggcccggtgcggcccgggggggaaaatagggcggatcccccccagtcgtacaggggattttccgcctcaatgtacggggaggccggcgctgcattcgccgtgttcacgcagacgttttcgtagacccgcatccatggtatttcctcgtagacacgccccccgtcctcgctcaccgtctcgtatattgactcgtcgtcctcgtagggggcgtgccgttcgcgggccgaggcggcgtgggtggctttgcggcgggcgtcgtcgtcgtcgtcgtcggccgtcagatacgtggcttccatctggtcgggttctccctccggggcgggtccccacacccgtggccgatcgaggctccccagagacgcgcgccggacgaggagggggcacgtcgccgccggcggtcgcctgtcgggtcccgcgacgttacgggccgggaggcgcgggggcacctcccccatgtgcgtgtaatacgtggccggctgtgtggccgcagcggggggctcggcgaccgggtcgttcgcatccggaagcgggggccccgcgccgtccgcgcggcgcctccggaacctccgggtggacgcgggggtcgagtgtaggcgaggtcgggggaggggcgggggctcgttgtcgcgccgcgcccgctgaatcttttcccgacaggtcccaccccccgcgcgatgcccccccgggccgctggccatgtcgtccgggggaggccccgcggaccacgtcgtccggcgagacgccacgagccgcaggatggactcgtagtggagcgacggcgccccgttgcggagcagatccgcggccagggcggccccgaaccaagccttgatgctcaactccatccgggcccagctgggggcggtcatcgtggggaacaggggggcggtggtccgacagaaacgctcctggctgtccaccgcggcccgcagatactcgttgttcaggctgtcggtggcccagacgccgtacccggtgagggtcgcgttgatgatatactgggcgtggtgatggacgatcgacagaacctccaccgtggatacgacggtatccacggtcccgtacgtaccgccgctccgcttgccggtctgccacaggttggctaggcgcgtcaggtggcccaggacgtcgctgaccgccgccctgagcgccatgcactgcatggagccggtcgtgccgctgggaccccggtccagatggcgcgcgaacgtttccgcgggcgcctccgggctgccgccgagcgggaggaaccggcgattggagggactcagccggtgacatacgtgcttgtccgtcgtccacagcatccaggacgcccaccggtacagcacggagacgtaggccaggagctcgttgagccgcagtgcggtgtcggtgctggggcggcttgggtccgccgggcgcataaagaacatgtactgctgaatccgatggagggcgtcgcgcaggccggccacggtggcggcgtacttggccgccacggccccgctcttgaacggggtgcgcgccagcagctttggcgccagggtgggccgcagcagcacgtgaaggctggggtcgcagtcgcccacggggtcctcggggacgtccaggccgctgggcaccaccgtctgcaggtacttccagtactgcgtgaggatggcgcggctcaactggccgccgggcagctccacctcgcccagcgcctgggtggcggccgaagcgtagtgccggatgtactcgtagtgcgggtcgctggcgagcccgtccacgatcaaactctcgggaaccgtgttgtgttgccgcgcggccaaccggacgctgcgatcggtgcaggtcagaaacgccggctgcgcgtcgtcggagcgctgccgcaaggcgcccacggccgcgctaaggagcccctccggggtggggagcagacacccgccgaagatgcgccgctcgggaacgcccgcgttgtcgccgcggatcaggttggcaggcgtcaggcaccgcgccagccgcagggagctcgcgccgcgcgtccggcgctgcatggtgacgcccgttcggtcgggacccgccggtcggagttatgccgcgtccagggccatcggggcgctttttatcgggaggagcttatgggcgtggcgggcctcccagcccggtcgcgcgcctccccgacacgtgcgcccgcagggcggcggccccctcgtctcccatcagcagtttcctaaactgggacatgatgtccaccacgcggacccgcgggcccaacacggacccgccgcttacgggggcgggggggaagggctccaggtccttgagaagaaaggcggggtctgccgtcccggacacgggggcccggggcgctgaggaggcggggcgcagatccacgtgctccgcggccgcgcggacgtccgcccagaacttggcgggggtggtgcgcgcgtacaggggctgggtcgctcggaggacgcacgcgtagcgcaggggggtgtacgtgcccacctcgggggccgtgaatcccccgtcaaacgcggccagtgtcacgcacgccaccacggtgtcggcaaagcccagcagccgctgcaggacgagcccggcggccagaatggcgcgcgtggccgccgcgtcgtcccggcgccggtgcgcgtccccgcacgcccgggcgtactttaaggtcacggtcgccagggccgtgtgcagcgcgtacaccgcagcgcccagcacggcgttgagcccgctgttggcgagcagccggcgcgctgcggtgtcgcccagcgcctcgtgctcggcccccacgaccgcggggcttcccaggggcagggcgcgaaacagctcctcccgcgccacgtccgcaaaggcggggtggtgcacgtgcgggtgcaggcgcgcccccacgaccaccgagagccactggaccgtctgctccgccatcaccgccagcacatccagcacgcgccccaggaaggcggcctcccgcgtcaaaacgcaccggacggcgtcgggattgaagcgggcgagcagggccccggtggccaggtacgtcatgcggccggcatagcgggcggccacgcgacagtcgcggtccagcagcgcgcgcaccccgggccagtacagcagggaccccagcgagctgcggaacaccgcggcgtcggggccggattggggggacactaacccccccgcgctcagtaacggcacggccgcggccccgacgggacgcaacgccgtgaggctcgcgaactgccgcctcagctcggccgccctgtcgtccaggtcagacccgcgcgcctccgcgtgaaggcgcgtcccgcacacccacccgttgatggccagccgcacgacggcatccgccaaaaagctcatcgcctgggcggggctggtttttgttcgacgatccgtcaggtcaagaatcccatcgcccgtgatataccaggccaacgcctcgccctgctgcagggtttggcggaaaaacaccgcggggttgtcgggggaggcgaagtgcatgacccccacgcgcgataacccgaacgcgctatccggacacgggtaaaacccggccggatgccccagggctagggcggagcgcacggactcgtcccacacggcaacctgaggggccagtcgatccaacgggaatgccgcccggagctccgggcccggcacgcgtccctccagaacctccaccttgggcggggaacgggccccgccgccgtcctccggcccgacggcttccgggtagtcgtcctcctcgtactgcagctcctctaggaacagcggcgacggcgccacccgcgaaccgccgacccgccccaaaatagcccgcgcgtcgacgggacccaggtatcccccctgccgggcctgcggaggaccgcggggaacctcatcatcatcgtccaggcgaccgcgcaccgactggctacgggccgcatcgggcccggggcgctgccgggacgctcggcgatgggatgtgggcggggcttccgacgcgcgccgtcgtcgggctcgcgggccttcccgtcgacggcgcacgggcggctcgtcgcccgccatctcctccagagcctctagctcgctgtcgtcatccccgcggaacaccgcacgcaggtaccccatgaaccccaccccatcgcccgctggctcgtccgccacgggcgaggcgcgggggcgggtggatgcgcgcctcctgcgccccgcgggttcgcgagccgacatggtggcgatagacgcgggttatcggatgtccgctaccccccaaaaaagaaaaagaccccacagcgcggatggaggccggggtaggtgccgccggaccccctcgcgatgggaatggacgggagcgacggggccggcgcaaaaaaacgcagtatctcccgcgaaggctacccgccgccccagcccccggccaaatgcggaaacggtcccgcgctctcgcctttatacgcgggccgccctgcgacacaatcacccgtccgtggtttcgaatctacacgacaggcccgcagacgcggctaacacacacgccggcaacccagaccccagtgggttggttgcgcggtcccgtctcctggctagttctttcccccaccaccaaataatcagacgacaaccgcaggttttgtaatgtatgtgctcgtgtttattgtggatacgaaccggtgacgggaggggaaaacccagacgggggatgcgggtccggtcgcgccccctacccaccgtactcgtcaattccaagggcatcggtaaacatctgctcaaactcgaagtcggccatatccagagcgccgtagggggcggagtcgtggggggtaaatcccggccccggggaatccccgtcccccaacatgtccagatcgaaatcgtctagcgcgtcggcatgcgccatcgccacgtcctcgccgtctaagtggagctcgtcccccaggctgacatcggtcgggggggccgtcgacagtctgcgcgtgtgtcccgcggggagaaaggacaggcgcggagccgccagccccgcctcttcgggggcgtcgtcgtccgggagatcgagcaggccctcgatggtagacccgtaattgtttttcgtacgcgcgcggctgtacgcgtgttcccgcatgaccgcctcggagggcgaggtcgtgaagctggaatacgagtccaacttcgcccgaatcaacaccataaagtacccagaggcgcgggcctggttgccatgcagggtgggaggggtcgtcaacggcgcccctggctcctccgtagccgcgctgcgcaccagcgggaggttaaggtgctcgcgaatgtggtttagctcccgcagccggcgggcctcgattggcactccccggacggtgagcgctccgttgacgaacatgaagggctggaacagacccgccaactgacgccagctctccaggtcgcaacagaggcagtcaaacaggtcgggccgcatcatctgctcggcgtacgcggcccataggatctcgcgggtcaaaaatagatacaaatgcaaaaacaaaacacgcgccagacgagcggtctctcggtagtacctgtccgcgatcgtggcgcgcagcatttctcccaggtcgcgatcgcgtccgcgcatgtgcgcctggcggtgcagctgccggacgctggcgcgcaggtaccggtacagggccgagcagaagttggccaacacggttcgatagctctcctcccgcgcccgtagctcggcgtggaagaaacgagagagcgcttcgtagtagagcccgaggccgtcgcgggtggccggaagcgtagggaaggccacgtcgccgtgggcgcgaatgtcgatttgggtgcgttcggggacgtacgcgtccccccattccaccacatcgctgggcagcgttgataggaatttacactcccggtacaggtcggcgttggtcggtagcgccgaaaacagatcctcgttccaggtatcgagcatggtacatagcgcggggcccgcgctaaagcccaagtcgtcgaggagacggttaaagagggcggcgggggggacgggcatgggtggggagggcatgagctgggcctggctcaggcgccccgttgcgtacagcgggggggccgccggggtgtttttgggacccccggccgggcgggggggcggtggcgaagcgccgtccgcgttcatgtcggcaaacagctcgtcgaccaagaggtccattgggtggggttgatacgggaaagacgatatcgggcttttgatgcgatcgtccccgcccgcccagagagtgtgggacgcccgacggcgcgggaagagaaaacccccaaacgcgttagaggaccggacggaccttatggggggaagtgggcagcgggaaccccgtccgttcccgaggaatgacagcccgtggtcgccaccacgcatttaagcaacccgcacgggccgccccgtacctcgtgacttccccccacattggctcctgtcacgtgaaggcgaaccgagggcggctgtccaacccaccccccgccacccagtcccggtccccgtcggattgggaaacaaaggcacgcaacgccaacaccgaatgaacccctgttggtgctttattgtctgggtacggaagttttcactcgacgggccgtctggggcgagaagcggagcgggctggggctcgaggtcgctcggtggggcgcgacgccgcagaacgccctcgagtcgccgtggccgcgtcgacgtcctgcaccacgtctggattcaccaactcgttggcgcgctgaagcaggtttttgccctcgcagaccgtcacgcggatggtggtgatgccaaggagttcgttgaggtcttcgtctgtgcgcggacgcgacatgtcccagagctggaccgccgccatccgggcatgcatggccgccaggcgcccgaccgcggcgcagaagacgcgcttgttaaagccggccacccggggggtccatggcgcgtcggggtttgggggggcggtgctaaagtgcagctttctggccagcccctgcgcgggtgtcttggatcgggttggcgccgtcgacgcgggggcgtctgggagtgcggcggattctggctgggccgatttcctgccgcgggtggtctccgccgccggggccgcgggggccttagtcgccacccgctgggttcggggggcccggggggcggtggtgggtgtgcgtccggcccctccggacccagcgggtggcggaggcgcccgcgcaggccccgggccggacaaaaccgccccggaaacgggacgccgcgtccgggggacctccgggtgttcgtcgtcttcggatgacgagcccccgtagagggcataatccgactcgtcgtactggacgaaacggacctcgcccctctggcgcgagcgtgtctgtagggcgccacggcgggaggtgtcaggcggactatcgggactcgccatacctgaagacggggtgtagtacagatcctcgtactcatcgcgcggaacctcccgcggacccgacttcacggagcggcgagaggtcatggttccacgaacacgctagggtcggatgcgcggacaattaggcctgggttcggacggcgggggtggtgcaggtgtggagaggtcgagcgataggggcggcccgggagagaagagagggtccgcaaaacccactggggatgcgtgagtggccctctgtgggcggtgggggagagtcttataggaagtgcatataaccacaacccatgggtctaaccaatccccaggggccaagaaacagacacgccccaaacggtctcggtttccgcgaggaaggggaagtcctgggacaccctccacccccacccctcaccccacacagggcgggttcaggcgtgcccggcagccagtagcctctggcagatctgacagacgtgtgcgataatacacacgcccatcgaggccatgcctacataaaagggcaccagggcccccggggcagacatttggccagtgttttgggtctcgcaccgcgcgcccccgatcccatcgcgcccgccctcctcgccgggcggctccccgcgcgggcccgcgtctcccgccgctaaggcgacgagcaagacaaacaacaggcccgcccgacagacccttctgggggggcccatcgtccctaacaggaagatgagtcagtggggatccggggcgatccttgtccagccggacagcttgggtcgggggtacgatggcgactggcacacggccgtcgctactcgcgggggcggagtcgtgcaactgaacctggtcaacaggcgcgcggtggcttttatgccgaaggttagcggggactccggatgggccgtcgggcgcgtctctctggacctgcgaatggctatgccggctgacttttgcgcgattattcacgcccccgcgctagccagccccgggcaccacgtaatactgggtcttatcgactcggggtaccgcggaaccgttatggccgtggtcgtagcgcctaaaaggacgcgggaatttgcccccgggaccctgcgggtcgacgtgacgttcctggacatcctggcgacccccccggccctcaccgagccgatttccctgcggcagttcccgcaactggcgcccccccctccaaccggggccgggatacgcgaagatccttggttggagggggcgctcggggccccaagcgtgactacggccctaccggcgcgacgccgagggcggtccctcgtctatgccggcgagctgacgccggttcagacggaacacggggacggcgtacgagaagccatcgccttccttccaaaacgcgaggaggatgccggtttcgacattgtcgtccgtcgcccggtcaccgtcccggcaaacggcaccacggtcgtgcagccatccctccgcatgctccacgcggacgccgggcccgcggcctgctatgtgttggggcggtcgtcgctcaacgcccgcggcctcctggtcgttcctacgcgctggctccccgggcacgtatgtgcgtttgttgtttacaaccttacgggggttcctgtgaccctcgaggccggcgccaaggtcgcccagctcctggttgcgggggcggacgctcttccttggatccccccggacaactttcacgggaccaaagcgcttcgaaactaccccaggggtgttccggactcaaccgccgaacccaggaacccgccgctcctggtgtttacgaacgagtttgacgcggaggcccccccgagcgagcgcgggaccgggggttttggctctaccggtatttagcccacagctttgggttcgttccgggcaataaaaaacgtttgtatcgcatctttcctgtgtgtagttgtttatgttggatgcctgtgggtctatcacacccgcccctccatcccacaaacacaaaacacacgggttggatgaaaacacgcatttattgacccaaaacacacggagctgctcgagatgggccagggcgaggtgcggttggggaggctgtaggtctgggaacggacacgcggggacacgattccggtttggggtccgggagggcgtcgccgtttcgggcggcaggcgccagcgtaacctccgggggcggcgtgtgggggtgccccaaggagggcgcctcggtcaccccaatcccccccgaccgggttcccccggcaaccccgaaggcggagaggccaagggcccgttcggcgatggccacatcctccatgaccacgtcactctcggccatgctccgaatagcctgggagacgagcacatccgcggacttgtcagccgcccccacggacatgtacatctgcaggatggtggccatacacgtgtccgccaggcgccgcatcttgtcctgatgggccgccacggccccgtcgatcgtgggggcctcgagcccggggtggtggcgcgccagtcgttctaggttcaccatgcaggcgtggtacgtgcgggccaaggcgcgggccttcacgaggcgtcgggtgtcgtccagggaccccagggcgtcatcgagcgtgatgggggcgggaagtagcgcgttaacgaccgccagggcctcctgcagccgcggctccgcctccgagggcggaacggccgcgcggatcatctcatattgttcctcggggcgcgctccccagccacatatagccccgagaagagaagccatcgcgggcgggtactggcccttgggcgcgcggacgcaatggggcaggaagacgggaaccgcggggagaggcgggcggccgggactcccgtggaggtgaccgcgctttatgcgaccgacgggtgcgttattacctcttcgatcgccctcctcacaaactctctactgggggccgagccggtttatatattcagctacgacgcatacacgcacgatggccgtgccgacgggcccacggagcaagacaggttcgaagagagtcgggcgctctaccaagcgtcgggcgggctaaatggcgactccttccgagtaaccttttgtttattggggacggaagtgggtgggacccaccaggcccgcgggcgaacccgacccatgttcgtctgtcgcttcgagcgagcggacgacgtcgccgcgctacaggacgccctggcgcacgggaccccgctacaaccggaccacatcgccgccaccctggacgcggaggccacgttcgcgctgcatgcgaacatgatcctggctctcaccgtggccatcaacaacgccagcccccgcaccggacgcgacgccgccgcggcgcagtatgatcagggcgcgtccctacgctcgctcgtggggcgcacgtccctgggacaacgcggccttaccacgctatacgtccaccacgaggtgcgcgtgcttgccgcgtaccgcagggcgtattatggaagcgcgcagagtcccttctggtttcttagcaaattcgggccggacgaaaaaagcctggtgctcaccactcggtactacctgcttcaggcccagcgtctggggggcgcgggggccacgtacgacctgcaggccatcaaggacatctgcgccacctacgcgattccccacgccccccgccccgacaccgtcagcgctgcgtccctgacctcgtttgccgccatcacgcggttctgttgcacgagccagtacgcccgcggggccgcggcggccgggtttccgctttacgtggagcgccgtattgcggccgacgtccgcgagaccagtgcgctggagaagttcataacccacgatcgcagttgcctgcgcgtgtccgaccgtgaattcattacgtacatctacctggcccattttgagtgtttcagccccccgcgcctagccacgcatcttcgggccgtgacgacccacgaccccaaccccgcggccagcacggagcagccctcgcccctgggcagggaggccgtggaacaatttttttgtcacgtgcgcgcccaactgaatatcggggagtacgtcaaacacaacgtgaccccccgggagaccgtcctggatggcgatacggccaaggcctacctgcgcgctcgcacgtacgcgcccggggccctgacgcccgcccccgcgtattgcggggccgtggactccgccaccaaaatgatggggcgtttggcggacgccgaaaagctcctggtcccccgcgggtggcccgcgtttgcgcccgccagtcccggggaggacacggcgggcggcacgccgcccccacagacctgcggaattgtcaagcgcctcctgagactggccgccacggaacagcagggccccacacccccggcgatcgcggcgcttatccgtaatgcggcggtgcagactcccctgcccgtctaccggatatccatggtccccacgggacaggcatttgccgcgctggcctgggacgactgggcccgcataacgcgggacgctcgcctggccgaagcggtcgtgtccgccgaagcggcggcgcaccccgaccacggcgcgctgggcaggcggctcacggatcgcatccgcgcccagggccccgtgatgccccctggcggcctggatgccggggggcagatgtacgtgaatcgcaacgagatattcaacggcgcgctggcaatcacaaacatcatcctggatctcgacatcgccctgaaggagcccgtcccctttcgccggctccacgaggccctgggccactttaggcgcggggctctggctgcggttcagctcctgtttcccgcggcccgcgtggaccccgacgcatatccctgttattttttcaaaagcgcatgtcggcccggcccggcgtccgtgggttccggcagcggactcggcaacgacgacgacggggactggtttccctgctacgacgacgccggtgatgaggagtgggcggaggacccgggcgccatggacacatcccacgatcccccggacgacgaggttgcctactttgacctgtgccacgaagtcggccccacggcggaacctcgcgaaacggattcgcccgtgtgttcctgcaccgacaagatcggactgcgggtgtgcatgcccgtccccgccccgtacgtcgtccacggttctctaacgatgcggggggtggcacgggtcatccagcaggcggtgctgttggaccgagattttgtggaggccatcgggagctacgtaaaaaacttcctgttgatcgatacgggggtgtacgcccacggccacagcctgcgcttgccgtattttgccaaaatcgcccccgacgggcctgcgtgcggaaggctgctgccagtgtttgtgatcccccccgcctgcaaagacgttccggcgtttgtcgccgcgcacgccgacccgcggcgcttccattttcacgccccgcccacctatctcgcttccccccgggagatccgtgtcctgcacagcctgggtggggactatgtgagcttctttgaaaggaaggcgtcccgcaacgcgctggaacactttgggcgacgcgagaccctgacggaggtcctgggtcggtacaacgtacagccggatgcgggggggaccgtcgaggggttcgcatcggaactgctggggcggatagtcgcgtgcatcgaaacccactttcccgaacacgccggcgaatatcaggccgtatccgtccggcgggccgtcagtaaggacgactgggtcctcctacagctagtccccgttcgcggtaccctgcagcaaagcctgtcgtgtctgcgctttaagcacggccgggcgagtcgcgccacggcgcggacattcgtcgcgctgagcgtcggggccaacaaccgcctgtgcgtgtccttgtgtcagcagtgctttgccgccaaatgcgacagcaaccgcctgcacacgctgtttaccattgacgccggcacgccatgctcgccgtccgttccctgcagcacctctcaaccgtcgtcttgataacggcgtacggcctcgtgctcgtgtggtacaccgtcttcggtgccagtccgctgcaccgatgtatttacgcggtacgccccaccggcaccaacaacgacaccgccctcgtgtggatgaaaatgaaccagaccctattgtttctgggggccccgacgcacccccccaacgggggctggcgcaaccacgcccatatctgctacgccaatcttatcgcgggtagggtcgtgcccttccaggtcccacctgacgccatgaatcgtcggatcatgaacgtccacgaggcagttaactgtctggagaccctatggtacacacgggtgcgtctggtggtcgtagggtggttcctgtatctggcgttcgtcgccctccaccaacgccgatgtatgtttggcgtcgtgagtcccgcccacaagatggtggccccggccacctacctcttgaactacgcaggccgcatcgtatcgagcgtgttcctgcagtacccctacacgaaaattacccgcctgctctgcgagctgtcggtccagcggcaaaacctggttcagttgtttgagacggacccggtcaccttcttgtaccaccgccccgccatcggggtcatcgtaggctgcgagttgatgctacgctttgtggccgtgggtctcatcgtcggcaccgctttcatatcccggggggcatgtgcgatcacataccccctgtttctgaccatcaccacctggtgttttgtctccaccatcggcctgacagagctgtattgtattctgcggcggggcccggcccccaagaacgcagacaaggccgccgccccggggcgatccaaggggctgtcgggcgtctgcgggcgctgctgttccatcatcctctcgggcatcgcagtgcgattgtgttatatcgccgtggtggccggggtggtgctcgtggcgcttcactacgagcaggagatccagaggcgcctgtttgatgtatgacgtcacatccaggccggcggaaaccgtaacggcatatgcaaattggaaactgtcctgtcttggggcccacccacccgacgcgtcatatgcaaatgaaaatcggtcccccgaggccacgtgtagcctggatcccaacgaccccgcccatgggtcccaattggccgtcccgttaccaagaccaacccagccagcgtatccacccccgcccgggtccccgcggaagcggaacggggtatgtgatatgctaattaaatacatgccacgtacttatggtgtctgattggtccttgtctgtgccggaggtggggcgggggccccgcccggggggcggaacgaggaggggtttgggagagccggccccggcaccacgggtataaggacatccaccacccggccggtggtggtgtgcagccgtgttccaaccacggtcacgcttcggtgcctctccccgattcgggcccggtcgctcgctaccggtgcgccaccaccagaggccatatccgacaccccagccccgacggcagccgacagcccggtcatggcgactgacattgatatgctaattgacctcggcctggacctctccgacagcgatctggacgaggacccccccgagccggcggagagccgccgcgacgacctggaatcggacagcagcggggagtgttcctcgtcggacgaggacatggaagacccccacggagaggacggaccggagccgatactcgacgccgctcgcccggcggtccgcccgtctcgtccagaagaccccggcgtacccagcacccagacgcctcgtccgacggagcggcagggccccaacgatcctcaaccagcgccccacagtgtgtggtcgcgcctcggggcccggcgaccgtcttgctcccccgagcagcacgggggcaaggtggcccgcctccaacccccaccgaccaaagcccagcctgcccgcggcggacgccgtgggcgtcgcaggggtcggggtcgcggtggtcccggggctgccgatggtttgtcggacccccgccggcgtgcccccagaaccaatcgcaaccctgggggaccccgccccggggcggggtggacggacggccccggcgccccccatggcgaggcgtggcgcggcagtgagcagcccgacccacccggaggccagcggacacggggcgtgcgccaagcaccccccccgctaatgacgctggcgattgcccccccgcccgcggacccccgcgccccggccccggagcgaaaggcgcccgccgccgacaccatcgacgccaccacgcggttggtcctgcgctccatctccgagcgcgcggcggtcgaccgcatcagcgagagctttggccgcagcgcacaggtcatgcacgacccctttggggggcagccgtttcccgccgcgaatagcccctgggccccggtgctggcgggccaaggagggccctttgacgccgagaccagacgggtctcctgggaaaccttggtcgcccacggcccgagcctctatcgcacttttgccggcaatcctcgggccgcatcgaccgccaaggccatgcgcgactgcgtgctgcgccaagaaaatttcatcgaggcgctggcctccgccgacgagacgctggcgtggtgcaagatgtgcatccaccacaacctgccgctgcgcccccaggaccccattatcgggacggccgcggctgtgctggataacctcgccacgcgcctgcggccctttctccagtgctacctgaaggcgcgaggcctgtgcggcctggacgaactgtgttcgcggcggcgtctggcggacattaaggacattgcatccttcgtgtttgtcattctggccaggctcgccaaccgcgtcgagcgtggcgtcgcggagatcgactacgcgacccttggtgtcggggtcggagagaagatgcatttctacctccccggggcctgcatggcgggcctgatcgaaatcctagacacgcaccgccaggagtgttcgagtcgtgtctgcgagttgacggccagtcacatcgtcgcccccccgtacgtgcacggcaaatatttttattgcaactccctgttttaggtacaataaaaacaaaacatttcaaacaaatcgcccctcgtgttgtccttctttgctcatggccggcggggcgtgggtcacggcagatggcgggggtgggcccggcgtacggcctgggtgggcggagggaactaacccaacgtataaatccgtccccgttccaaggccggtgtcatagtgcccttaggagcttcccgcccgggcgcatccccccttttgcactatgacagcgacccccctcaccaacctgttcttacgggccccggacataacccacgtggcccccccttactgcctcaacgccacctggcaggccgaaacggccatgcacaccagcaaaacggactccgcttgcgtggccgtgcggagttacctggtccgcgcctcctgtgagaccagcggcacaatccactgctttttctttgcggtatacaaggacacccaccacacccctccgctgattaccgagctccgcaactttgcggacctggttaaccacccgccggtcctacgcgaactggaggataagcgcggggtgcggctgcggtgtgcgcggccgtttagcgtcgggacgattaaggacgtctctgggtccggcgcgtcctcggcgggagagtacacgataaacgggatcgtgtaccactgccactgtcggtatccgttctcaaaaacatgctggatgggggcctccgcggccctacagcacctgcgctccatcagctccagcggcatggccgcccgcgcggcagagcatcgacgcgtcaagattaaaattaaggcgtgatctccaacccccccatgaatgtgtgtaaccccccccaaaaaaataaagagccgtaacccaaccaaaccaggcgtggtgtgagtttgtggacccaaagccctcagagacaacgcgacaggccagtatggaccgtgatacttttatttattaactcacaggggcgcttaccgccacaggaataccagaataatgaccaccacaatcgcgaccaccccaaatacagcatggcgccacaccacgccacaacagccctgtcgccggtatggggcatgatcagacgagccgcgcgccgcgcgttgggccctgtacagctcgcgcgaattgaccctaggaggccgccacgcgcccgagttttgcgttcgtcgctggtcgtcgggcgccaaagccccggacggctgttcggtcgaacgaacggccacgacagtggcataggttggggggtggtccgacatagcctcggcgtacgtcgggaggcccgacaagaggtcccttgtgatgtcgggtggggccacaagcctggtttccggaagaaacaggggggttgccaataacccgccagggccaaaactccggcgctgcgcacgtcgttcggcgcggcgccgggcgcgccgagcggctcgctgggcggcttggcgtgagcggccccgctccgacgcctcgccctctccggaggaggttggcggaattggcacggacaacaggggcccagcagagtacggtggaggtgggtccgtgggggtgtccagatcaataacgacaaacggcccctcgttcctaccagacaagctatcgtaggggggcgggggatcagcaaacgcgttccccgcgctccataaacccgcgtcgggttgcgccgcctccgaagccatggatgcgccccaaagccacgactcccgcgcgctaggtccttggggtaatggaaaaggccctactccccatccaagccagccaagttaacgggctacgccttcgggaatgggactggcaccccggcggattttgttgggctggcatgcgtcgcccaaccgagggccgcgtccacgggacgcgccttttataaccccgggggtcattcccaacgatcacatgcaatctaactggctcccctctccccccctctcccctctccccccctctcccctctccccccctctcccctctccccccctctcccctctccccccctctcccctctccccccctctcccctctccccccctctcccctctccccccctctcccctctccccccctctcccctctccccccctctcccctctcccctctgctctttccccgtgacacccgacgctgggggcgtggctgccgggaggggccgcggatgggcgggcctacttggtctcccgccccccccccccccccccgaaccgccccgccggctttgcccccctttgatcccctgctacccccaacccgtgctggtggtgcgggttggggggggatgtgggcgggggtgcgcgggaggtgtcggtggtggtggtggtggtggtagtaggaatggtggtgagggggggggggcgctggttggtcaaaaaagggagggacgggggccggcagaccgacggcgacaacgctccccggcggccgggtcgcggctcttacgagcggcccggcccgcgctcccaccccccgggccgtgtccttgctttccccccgtctcccccccccccgccttctcctcctcctcctcgtttttccaaaccccgcccacccggcccggcccggcccggcccggcccggccaccgccgcccacccacccacctcgggatacccagccccggtcccccgttccccgggggccgttatctccagcgccccgtccggcgcgccgccccccgccgctaaaccccatcccgcccccgggaccccacatataagcccccagccacacgcaagaacagacacgcagaacggctgtgtttatttaaataaaccaatgtcggaataaacaaacacaaacacccgcgacggggggacggaggggacggagggagggggtgacgggggacgggaacagacacaaaaacaaccacaaaaaacaaccacccaccgacacccccaccccagtctcctcgccttctcccacccaccccacgcccccactgagcccggtcgatcgacgagcacccccgcccacgcccccgcccctgccccggcgacccccggcccgcacgatcccgacaacaataacaaccccaacggaaagcggcggggtgttgggggaggcgaggaacaaccgaggggaacgggggatggaaggacgggaagtggaagtcctgatacccatcctacacccccctgccttccaccctccggccccccgcgagtccacccgccggccggctaccgagaccgaacacggcggccgccgcagccgccgcagccgccgccgacaccgcagagccggcgcgcgcactcacaagcggcagaggcagaaaggcccagagtcattgtttatgtggccgcgggccagcagacggcccgcgacaccccccccccgcccgtgtgggtatccggccccccgccccgcgccggtccattaagggcgcgcgtgcccgcgagatatcaatccgttaagtgctctgcagacaggggcaccgcgcccggaaatccattaggccgcagacgaggaaaataaaattacatcacctacccacgtggtgctgtggcctgtttttgctgcgtcatctcagcctttataaaagcgggggcgcggccgtgccgatcgcgggtggtgcgaaagactttccgggcgcgtccgggtgccgcggctctccgggcccccctgcagccggggcggccaaggggcgtcggcgacatcctccccctaagcgccggccggccgctggtctgttttttcgttttccccgtttcgggggtggtgggggttgcggtttctgtttctttaacccgtctggggtgtttttcgttccgtcgccggaatgtttcgttcgtctgtcccctcacggggcgaaggccgcgtacggcccgggacgaggggcccccgaccgcggcggtccgggccccgtccggacccgctcgccggcacgcgacgcgaaaaaggccccccggaggcttttccgggttcccggcccggggcctgagatgaacactcggggttaccgccaacggccggcccccgtggcggcccggcccggggccccggcggacccaaggggccccggcccggggccccacaacggcccggcgcatgcgctgtggtttttttttcctcggtgttctgccgggctccatcgcctttcctgttctcgcttctccccccccccttcttcacccccagtaccctcctccctcccttcctcccccgttatcccactcgtcgagggcgccccggtgtcgttcaacaaagacgccgcgtttccaggtaggttagacacctgcttctccccaatagaggggggggacccaaacgacagggggcgccccagaggctaaggtcggccacgccactcgcgggtgggctcgtgttacagcacaccagcccgttcttttccccccctcccacccttagtcagactctgttacttacccgtccgaccaccaactgcccccttatctaagggccggctggaagaccgccagggggtcggccggtgtcgctgtaaccccccacgccaatgacccacgtactccaagaaggcatgtgtcccaccccgcctgtgtttttgtgcctggctctctatgcttgggtcttactgcctggggggggggagtgcgggggagggggggtgtggaaggaaatgcacggcgcgtgtgtaccccccctaaagttgttcctaaagcgaggatacggaggagtggcgggtgccgggggaccggggtgatctctggcacgcgggggtgggaagggtcgggggagggggggatggagtaccggcccacctggccggcgcgggtgcgcgtgcctttgcacaccaaccccacgtcccccggcggtctctaagaagcaccgccccccctccttcataccaccgagcatgcctgggtgtgggttggtaaccaacacgcccatcccctcgtctcctgtgattctctggctgcaccgcattcttgttttctaactatgttcctgtttctgtctcccccccccccacccctccgccccaccccccaacacccacgtctgtggtgtggccgacccccttttgggcgccccgtcccgccccgccacccctcccatcctttgttgccctatagtgtagttaaccccccccgccctttgtggcggccagaggccaggtcagtccgggcgggcaggcgctcgcggaaacttaacacccacacccaacccactgtggttctggctccatgccagtggcaggatgctttcggggatcggtggtcaggcagcccgggccgcggctctgtggttaacaccagagcctgcccaacatggcacccccactcccacgcacccccactcccacgcacccccactcccacgcacccccactcccacgcacccccactcccacgcacccccactcccacgcacccccactcccacgcacccccactcccacgcacccccactcccacgcatccccgcgatacatccaacacagacagggaaaagatacaaaagtaaacctttatttcccaacagacagcaaaaatcccctgagtttttttttattagggccaacacaaaagacccgctggtgtgtggtgcccgtgtctttcacttttcccctccccgacacggattggctggtgtagtgggcgcggccagagaccacccagcgcccgacccccccctccccacaaacacggggggcgtcccttattgttttccctcgtcccgggtcgacgccccctgctccccggaccacgggtgccgagaccgcaggctgcggaagtccagggcgcccactagggtgccctggtcgaacagcatgttccccacgggggtcatccagaggctgttccactccgacgcgggggccgtcgggtactcggggggcatcacgtggttacccgcggtctcggggagcagggtgcggcggctccagccggggaccgcggcccgcagccgggtcgccatgtttcccgtctggtccaccaggaccacgtacgccccgatgttccccgtctccatgtccaggatgggcaggcagtcccccgtgatagtcttgttcacgtaaggcgacagggcgaccacgctagagacccccgagatgggcaggtagcgcgtgaggccgcccgcggggacggccccggaagtctccgcgtggcgcgtcttccgggcacacttcctcggcccccgcggcccagaagcagcgcgggggccgagggaggtttcctcttgtctccctcccagggcaccgacggccccgcccgaggaggcggaagcggaggaggacgcggccccggcggcggaagaggcggcccccgcgggggtcggggccgaggaggaagaggcagaggaggaagaggcggaggccgccgaggacgtcaggggggtcccgggcccaccctggccgcgcccccccggccctgagtcggagggggggtgcgtcgccgccctcttggcccctgccggcgcgagggggggacgcgtggactggggggaggggttttcctggcccgacccgcgcctcttcctcggacgcaccgccgcctcctgctcgacagaggcggcggaggggagcggggcggcgccggagggggcggcgccgcgggagggcccgtgcccaccctccacgcccggcccccccgagccgcgcgccaccgtcgcacgcgcccggcacagactctgttcttggttcgcggcctgagccagggacgagtgcgactggggcacacggcgcgcgtccgcggggcgggcggccggctccgccccgggggccggggcgcgggggccgggccccggaggcggcgctcgcacgcacggggccacggccgcgcgggggcgcgcgggtcccgacgcggccgcggacgcggggggcccggggcggggggcggagcctggcatgggcgccgcggggggcctgtggggagaggccgggggggagtcgctgatcactatggggtctctgttgtttgcaaggggggcgggtctgttgacaagggggcccgtccggcccctcggccgccccgcctccgcttcaacaaccccaaccccaaccccaacccccccggaggggccagacgccccccgcggcgccgcggctcgcgactggcgggagccgccgccgccgctgctgttggtggtggtgttggtgttactgctgccgtgtggcccgatgggcgccgaggggggcgctgtccgagccgcggccggctggggggctgcgtgagacgccccgcccgtcacggggggcgcggcggcgcctctgcgtgggggggcgcggggcgtccggcggggggcgggcggtacgtagtctgctgcaagagacaacggggggcgcgatcaggttacgccccctccccggcccgccctttcctcgcccgcccgcctattcctccctccccccccctcctcctcctcctcccccagggtccttgccgccccccgcctcacaaaataatgctttatttgtgaaatttgtgatgctattgctttatttcactcctggactggctcccagcagtcaaaggggatgacaagcagaaagtccttcaggttctctttgaaactttcaaaggtgataatctgggttgcacaggaagtttccggggttggagggcagtgctgcttgtagtggctggccatcatggtcaaggggcccttgagcttggtgaggctgccccgcaggccctgcttgtacagctccaggcgggtctgtaggcaggtcggctcctggaggtcaaacatttctgagatgacttctactgtttcattcatctcagcagcagtgtctctactcaggttcaggagacgccgggcctcctggatggcattcacatgctcccagggctgcgtgctggggctgggcgagcgggcgggtgcagagatgctgcaggccacagtgcccaagagcagcaggctctgcagccacatcgatctgacggttcactaaacgagctctgcttatatagacctcccaccgtacacgcctaccgcccatttgcgtcaatggggcggagttgttacgacattttggaaagtcccgttgattttggtgccaaaacaaactcccattgacgtcaatggggtggagacttggaaatccccgtgagtcaaaccgctatccacgcccattgatgtactgccaaaaccgcatcaccatggtaatagcgatgactaatacgtagatgtactgccaagtaggaaagtcccataaggtcatgtactgggcataatgccaggcgggccatttaccgtcattgacgtcaatagggggcgtacttggcatatgatacacttgatgtactgccaagtgggcagtttaccgtaaatactccacccattgacgtcaatggaaagtccctattggcgttactatgggaacatacgtcattattgacgtcaatgggcgggggtcgttgggcggtcagccaggcgggccatttaccgtaagttatgtaacgcggaactccatatatgggctatgaactaatgaccccgtaattgattactattaataactgggggtcgtatgcggctggagggtcgcggacggagggtccctgggggtcgcaacgtaggcggggcttctgtggtgatgcggagagggggcggcccgagtctgcctggctgctgcgtctcgctccgagtgccgaggtgcaaatgcgaccagactgtcgggccagggctaacttataccccacgcctttcccctccccaaaggggcggcagtgacgattcccccaatggccgcgcgtcccaggggaggcaggcccaccgcggggcggccccgtccccggggaccaacccggcgcccccaaagaatatcattagcatgcacggcccggcccccgatttgggggcccaacccggtgtcccccaaagaaccccattagcatgcccctcccgccgacgcaacaggggcttggcctgcgtcggtgccccggggcttcccgccttcccgaagaaactcattaccatacccggaaccccaggggaccaatgcgggttcattgagcgacccgcgggccaatgcgcgaggggccgtgtgttccgccaaaaaagcaattagcataacccggaaccccaggggagtggttacgcgcggcgcgggaggcggggaataccggggttgcccattaagggccgcgggaattgccggaagcgggaagggcggccggggccgcccattaatgagtttctaattaccataccgggaagcggaacaaggcctcttgcaagtttttaattaccataccgggaagtgggcggcccggcccattgggcggtaactcccgcccaatgggccgggccccgaagactcggcggacgctggttggccgggccccgccgcgctggcggccgccgattggccagtcccgcccccgaggcgggcccgccctgtgagggcgggctggctccaagcgtatatatgcgcggctcctgccatcgtctctccggagagcggcttggtgcggagctcccgggagctccgcggaagacccaggccgcctcgggtgtaacgttagaccgagttcgccgggccggctccgcgggccagggcccgggcacgggcctcgggccccaggcacggcccgatgaccgcctcggcctccgccacccggcgccggaaccgagcccggtcggcccgctcgcgggcccacgagccgcggcgcgccaggcgggcggccgaggcccagaccaccaggtggcgcacccggacgtggggcgagaagcgcacccgcgcgggggtcgcgggggtcgcgggggtcgcgggggtcgcgggggtcgcggggggctccggcgccccctccccgcccgcgcgtcgcaggcgcaggcgcgccaggtgctccgcggtgacgcgcaggcggagggcgaggcgcggcggaaggcggaaggggcgcgagggggggtgggaggggtcagccccgccccccgggcccacgccgggcggtgggggccggggccggggggcggcggcggtgggccgggcctctggcgccggctcgggcggggggctgtccggccagtcgtcgtcatcgtcgtcgtcggacgcggactcgggaacgtggagccactggcgcagcagcagcgaacaagaaggcgggggcccaccggcggggggcggcggcggggcggccgcgggcgcgctcctgaccgcgggttccgagttgggcgtggaggttacctgggactgtgcggttgggacggcgcccgtgggcccgggcggccgggggcggcgggggccgcgatggcggcggcggcgggccatggagacagagagcgtgccggggtggtagagtttgacaggcaagcatgtgcgtgcagaggcgagtagtgcttgcctgtctaactcgctagtctcggccgcggggggcccgggctgcccgccgccgccgctttaaagggccgcgcgcgacccccggggggtgtgttttggggggggcccgttttcggggtctggccgctcctccccccgctcctccccccgctcctccccccgctcctccccccgctcctccccccgctcctccccccgctcctccccccgctcctccccccgctcctccccccgctcctccccccgctcctccccccgctcctccccccgctcctccccccgctcctccccccgctcctccccccgctcctccccccgctcctccccccgctcctccccccgctcccgcggccccgccccccacgcccgccgcgcgcgcgcacgccgcccggaccgccgcccgccttttttgcgcgcgcgcgcgcccgcggggggcccgggctgccacaggtgaaaccaacagagcacggcgcactccgcacgtcacacgtcacgtcatccaccacacctgcccaacaacacaactcacagcgacaactcaccgcgcaacaactcctgttcctcatccacacgtcaccgcgcacctcccgctcctccagacgtaccccggcgcaacacaccgctcctgctacacaccaccgcccctccccagccccagccctccccggccccagccctccccggccccagccctccccggccccagccctccccggccccagccctccccggccccagccctccccggccccagccctccccggccccagccctccccggccgcgtcccgcgctccctcgggggggttcgggcatctctacctcagtgccgccaatctcaggtcagagatccaaaccctccgggggcgcccgcgcaccaccaccgcccctcgccccctcccgcccctcgccccctcccgcccctcgccccctcccgcccctcgccccctcccgcccctcgccccctcccgcccctcgccccctcccgcccctcgccccctcccgcccctcgccccctcccgcccctcgccccctcccgcccctcgccccctcccgcccctcgccccctcccgcccctcgccccctcccgcccctcgccccctcccgcccctcgccccctcccgcccctcgccccctcccgcccctcgccccctcccgcccctcgccccctcccgcccctcgccccctcccgcccctcgccccctcccgcccctcgaataaacaacgctactgcaaaacttaatcaggttgttgccgtttattgcgtcttcgggtctcacaagcgccccgccccgtcccggcccgttacagcaccccgtccccctcgaacgcgccgccgtcgtcttcgtcccaggcgccttcccagtccacaacttcccgccgcgggggcgtggccaagcccgcctccgcccccagcacctccacggcccccgccgccgccagcacggtgccgctgcggcccgtggccgaggcccagcgaatcccgggcggcgccggcggcagggcccccgggccgtcgtcgtcgccgcgcagcaccagcgggggggcgtcgtcgtcgggctccagcagggcgcgggcgcaaaagtccctccgcggcccgcgccaccgggccgggccggcgcgcaccgcctcgcgccccagcgccacgtacacgggccgcagcggcgcgcccaggccccagcgcgcgcaggcgcggtgcgagtgggcctcctcctcgcagaagtccggcgcgccgggcgccatggcgtcggtggtccccgaggccgccgcccggccgtccagcgccggcagcacggcccggcggtactcgcgcggggacatgggcaccggcgtgtccgggccgaagcgcgtgcgcacgcggtagcgcacgttgccgccgcggcacaggcgcagcggcggcgcgtcggggtacaggcgcgcgtgcgcggcctccacgcgcgcgaagacccccgggccgaacacgcggcccgaggccagcaccgtgcggcgcaggtcccgcgccgccggccagcgcacggcgcactgcacggcgggcagcagctcgcacgccaggtaggcgtgctgccgcgacaccgcgggcccgtcggcgggccagtcgcaggcgcgcacggtgttgaccacgatgagccgccggtcgccggcgctggcgagcagccccagaaactccacggccccggcgaaggccaggtcccgcgtggacagcagcagcacgccctgtgcgcccagcgccgacacgtcgggggcgccggtccagttgcccgcccaggcggccgtgtccggcccgcacagccggttggccagggccgccagcaggcaggacagcccgccgcgctcggcggaccactccggcggcccccccgaggccccgccgccggccaggtcctcgcccggcagcggcgagtacagcaccaccacgcgcacgtcctcggggtcggggatctggcgcatccaggccgccatgcggcgcagcgggcccgaggcgcgcagggggccaaagaggcggcccccggcggccccgtgggggtgggggttatcgtcgtcgtcgccgccgccgcacgcggcctgggcggcgggggcgggcccggcgcaccgcgcggcgatcgaggccagggcccgcgggtcaaacatgagggccggtcgccaggggacggggaacagcgggtggtccgtgagctcggccacggcgcgcggggagcagtaggcctccagggcggcggccgcgggcgccgccgtgtggctgggccccgggggctgccgccgccagccgcccagggggtcggggccctcggcgggccggcgcgacagcgccacggggcgcgggcgggcctgcgccgcggcggcccggggcgccgcgggctgggcgggggcgggctcgggccccgggggcgtggaggggggcgcgggcgcggggaggggggcgcgggcgtccgagccgggggcgtccgcgccgctcttcttcgtcttcgggggtcgcgggccgccgcctccgggcggccgggccgggccgggactcttgcgcttgcgcccctcccgcggcgcggcggaggcggcggcggccgccagcgcgtcggcggcgtccggtgcgctggccgccgccgccagcagggggcgcaggctctggttgtcaaacagcaggtccgcggcggcggcggccgcggagctcggcaggcgcgggtcccgcggcagcgcggggcccagggccccggcgaccaggctcacggcgcgcacggcggccacggcggcctcgctgccgccggccacgcgcaggtccccgcgcaggcgcatgagcaccagcgcgtcgcgcacgaaccgcagctcgcgcagccacgcgcgcaggcggggcgcgtcggcgtgcggcggcggcggggaagcggggcccgcgggtccctccggccgcggggggctggcgggccgggccccggccagccccgggacggccgccaggtcgccgtcgaagccctcggccagcgcctccaggatcccgcggcaggcggccaggcactcgacggccacgcggccggcctgggcgcggcgcccggcgtcgtcgtcggcgtcggcgtggcgggcggcgtcggggtcgtcgccccccgcgggggaggcgggcgcggcggacagccgccccagggcggcgaggatccccgcggcgccgtacccggcgggcaccgcgcgctcgcccggtgcggcggcggcgacggcggcgaccccctcgtcatctgcgccggcgccggggctccccgcggcccccgtcagcgccgcgttctcgcgcgccaacaggggcgcgtaggcgcggcgcaggctggtcagcaggaagcccttctgcgcgcggtcgtatcggcggctcatggccacggcggccgccgcgtgcgccaggccccagccgaagcggccggccgccatggcgtagcccaggtggggcacggcccgcgccacgctgccggtgatgaaggagctgctgttgcgcgcggcgcccgagatccggaagcaggcctggtccagcgccacgtccccggggaccacgcgcgggttctggagccaccccatggcctccgcgtccggggtgtacagcagccgcgtgatcagggcgtactgctgcgcggcgtcgcccagctcgggcgcccacacggccgccggggcgcccgaggcctcgaaccggcgtcgcgcctcctccgcctcgggcgccccccagaggcccgggcggctgtcgcccaggccgccgtacagcacccgccccgggggcgggggcccggcgccgggccacggctccccgctgacgtacccgtcgcgatagcgcgcgtagaaggcgccggaggccgcgtcggcgtccagctcgacccgccggggctgcccggccgtgaagcggcccgtggcgtcgcggccggccaccgccgcgcgggcccggcggcgctcgatgcggcccgcggaggccgcgggggtcctcgccgccgcccggggcttgggcgcggcctcggagagggggggtggcccgggcgggggcggcgtccgcccgggggctgccggcgccgcgctcgacggaccccgcccgacggcccgcgcctcgcgtgcgtggtcggccgcgtcgttgccgtcgtcgtcctcgtcctcgtcggacgacgaggacgaagaggatgcggacgacgaggacgaggacccggagtccgacgaggtcgatgacgccgatggccgccaccggccgtgacgacgtctccgcggcggctgggccggcgggcgcggcgacaggcggtccgtggggtccggatacgcgccgcgtagcggggcctcccgttcgcggccccgggccggggcccggtcgccggcggcgtcggctgcgtcgtcgtactcgtccccgtcatcgtcgtcggctcgaaaggcgggggtccggggcggcgaggccgcggggtcgggcgtcgggatcgtccggacggcctcctctaccatggaggccagcagagccagctgtcgcggcgagacggcgtccccggcgtcctcgccggcgtcggtgcccgccgcgggggccctcccgtcccgccgggcgtcgtcgaggtcgtgggggtggtcggggtcgtggtcggggtcgtccccgccctcctccgtctccgcgccccacccgagggccccccgctcgtcgcggtctgggctcggggtgggcggcggcccgtcggtggggcccggggagccggggcgctgcttgttctccgacgccatcgccgatgcggggcgatcctccggggatacggctgcgacggcggacgtagcacggtaggtcacctacggactctcgatggggggagggggcgagacccacggaccccgacgacccccgccgtcgacgcggaactagcgcggaccggtcgatgcttgggtgggaaaaaggacagggacggccgatccccctcccgcgcttcgtccgcgtatcggcgtcccggcgcggcgagcgtctgacggtctgtctctggcggtcccgcgtcgggtcgtggatccgtgtcggcagccgcgctccgtgtggacgatcggggcgtcctcgggctcatatagtcccaggggccggcgggaaggaggagcagcggaggccgccggccccccgcccccccggcgggcccaccccgaacggaattccattatgcacgaccccgccccgacgccggcacgccgggggcccgtggccgcggcccgttggtcgaacccccggccccgcccatccgcgccatctgccatgggcggggcgcgagggcgggtgggtccgcgccccgccccgcatggcatctcattaccgcccgatccggcggtttccgcttccgttccgcatgctaacgaggaacgggcagggggcggggcccgggccccgacttcccggttcggcggtaatgagatacgagccccgcgcgcccgttggccgtccccgggccccccggtcccgcccgccggacgccgggaccaacgggacggcgggcggcccaagggccgcccgccttgccgcccccccattggccggcgggcgggaccgccccaagggggcggggccgccgggtaaaagaagtgagaacgcgaagcgttcgcacttcgtcccaatatatatatattattagggcgaagtgcgagcactggcgccgtgcccgactccgcgccggccccgggggcgggcccgggcggcggggggcgggtctctccggcgcacataaaggcccggcgcgaccgacgcccgcagacggcgccggccacgaacgacgggagcggctgcggagcacgcggaccgggagcgggagtcgcagagggccgtcggagcggacggcgtcggcatcgcgacgccccggctcgggatcgggatcgcatcggaaagggacacgcggacgcgggggggaaagacccgcccaccccacccacgaaacacaggggacgcaccccgggggcctccgacgacagaaacccaccggtccgccttttttgcacgggtaagcaccttgggtgggcggaggagggggggacgcgggggcggaggaggggggacgcgggggcggaggaggggggacgcgggggcggaggaggggggacgcgggggcggaggaggggggacgcgggggcggaggagggggctcacccgcgttcgtgccttcccgcaggaggaacgtcctcgtcgaggcgaccggcggcgaccgttgcgtggaccgcttcctgctcgtcgggcggggggaagccactgtggtcctccgggacgttttctggatggccgacatttccccaggcgcttttgcgccttgtgtaaaagcgcggcgtcccgctctccgatccccgcccctgggcacgcgcaagcgcaagcgcccttcccgccccctctcatcggagtctgaggtagaatccgatacagccttggagtctgaggtcgaatccgagacagcatcggattcgaccgagtctggggaccaggatgaagccccccgcatcggtggccgtagggccccccggaggcttggggggcggttttttctggacatgtcggcggaatccaccacggggacggaaacggatgcgtcggtgtcggacgaccccgacgacacgtccgactggtcttatgacgacattcccccacgacccaagcgggcccgggtaaacctgcggctcacgagctctcccgatcggcgggatggggttatttttcctaagatggggcgggtccggtctacccgggaaacgcagccccgggcccccaccccgtcggccccaagcccaaatgcaatgctacggcgctcggtgcgccaggcccagaggcggagcagcgcacgatggacccccgacctgggctacatgcgccagtgtatcaatcagctgtttcgggtcctgcgggtcgcccgggacccccacggcagtgccaaccgcctgcgccacctgatacgcgactgttacctgatgggatactgccgagcccgtctggccccgcgcacgtggtgccgtttgctgcaggtgtccggcggaacctggggcatgcacctgcgcaacaccatacgggaggtggaggctcgattcgacgccaccgcggaacccgtgtgcaagcttccttgtttggagaccagacggtacggcccggagtgtgatcttagtaatctcgagattcatctcagcgcgacaagcgatgatgaaatctccgatgccaccgatctggaggccgccggttcggaccacacgctcgcgtcccagtccgacacggaggatgccccctcccccgttacgctggaaaccccagaaccccgcgggtccctcgctgtgcgtctggaggatgagtttggggagtttgactggaccccccaggagggctcccagccctggctgtctgcggtcgtggccgataccagctccgtggaacgcccgggcccatccgattctggggcgggtcgcgccgcagaagaccgcaagtgtctggacggctgccggaaaatgcgcttctccaccgcctgcccctatccgtgcagcgacacgtttctccggccgtgagtccggtcgccccgacccccttgtatgtccccaaaataaaagaccaaaatcaaagcgtttgtcccagcgtcttaatggcgggaagggcggagagaaacagaccacgcggacatggggggtgtttgggggtttattggcaccgggggctaaagggtggtaaccggatagcagatgtgaggaagtcggggccgttcgccgcgaacggcgatcagagggtcagtttcttgcggaccacggcccggcgatgtgggttgctcgtctgggacctcgggcatgcccatacacgcacaacacggacgccgcaccggatgggacgtcgtaagggggcctggggtagctgggtggggtttgtgcagagcaatcagggaccgcagccagcgcatacaatcgcgctcccgtccgtttgtcccgggcagtaccacgccgtactggtattcgtaccggctgagcagggtctccagggggtggttgggggccgcggggaacggggtccacgccacggtccactcgggcaaaaaccgagtcggcacggcccacggttctcccacccacgcgtctggggtcttgatggcgataaatcttaccccgagccggattttttgggcgtattcgagaaacggcacacacagatccgccgcgcctaccacccacaagtggtagaggcgaggggggctgggttggtctcggtgcagcagtcggaagcacgccacggcgtccacgacctcggtgctctccaaggggctgtcctccgcaaacaggcccgtggtggtgtttggggggcagcgacaggacctagtgcgcacgatcgggcgggtgggtttgggtaagtccatcagcggctcggccaaccgtcgaaggttggccggacgaacgacgaccggggtacccaggggttctgatgccaaaatgcggcactgcctaagcaggaagctccacagggccgggcttgcgtcgacggaagtccggggcagggcgttgttctggtcaaggagggtcattacgttgacgacaacaacgcccatgttggtatattacaggcccgtgtccgatttggggcacttgcagatttgtaaggccacgcacggcggggagacaggccgacgcgggggctgctctaaaaatttaagggccctacggtccacagacccgccttcccgggggggcccttggagcgaccggcagcggaggcgtccgggggaggggagggtgatttacgggggggtaggtcagggggtgggtcgtcaaactgccgctccttaaaaccccggggcccgtcgttcggggtgctcgttggttggcactcacggtgcggcgaatggcctgtcgtaagttttgtcgcgtttacgggggacagggcaggaggaaggaggaggccgtcccgccggagacaaagccgtcccgggtgtttcctcatggccccttttataccccagccgaggacgcgtgcctggactccccgcccccggagacccccaaaccttcccacaccacaccacccagcgaggccgagcgcctgtgtcatctgcaggagatccttgcccagatgtacggaaaccaggactaccccatagaggacgaccccagcgcggatgccgcggacgatgtcgacgaggacgccccggacgacgtggcctatccggaggaatacgcagaggagctttttctgcccggggacgcgaccggtccccttatcggggccaacgaccacatccctcccccgtgtggcgcatctccccccggtatacgacgacgcagccgggatgagattggggccacgggatttaccgcggaagagctggacgccatggacagggaggcggctcgagccatcagccgcggcggcaagcccccctcgaccatggccaagctggtgactggcatgggctttacgatccacggagcgctcaccccaggatcggaggggtgtgtctttgacagcagccatccagattacccccaacgggtaatcgtgaaggcggggtggtacacgagcacgagccacgaggcgcgactgctgaggcgactggaccacccggcgatcctgcccctcctggacctgcatgtcgtctccggggtcacgtgtctggtcctccccaagtaccaggccgacctgtatacctatctgagtaggcgcctgaacccactgggacgcccgcagatcgcagcggtctcccggcagctcctaagcgccgttgactacattcaccgccagggcattatccaccgcgacattaagaccgaaaatatttttattaacacccccgaggacatttgcctgggggactttggcgccgcgtgcttcgtgcagggttcccgatcaagccccttcccctacggaatcgccggaaccatcgacaccaacgcccccgaggtcctggccggggatccgtataccacgaccgtcgacatttggagcgccggtctggtgatcttcgagactgccgtccacaacgcgtccttgttctcggccccccgcggccccaaaaggggcccgtgcgacagtcagatcacccgcatcatccgacaggcccaggtccacgttgacgagttttccccgcatccagaatcgcgcctcacctcgcgctaccgctcccgcgcggccgggaacaatcgcccgccgtacacccgaccggcctggacccgctactacaagatggacatagacgtcgaatatctggtttgcaaagccctcaccttcgacggcgcgcttcgccccagcgccgcagagctgctttgtttgccgctgtttcaacagaaatgaccgccccctgggggcggtgctgtttgcgggttggcacaaaaagaccccgatccgcgtctgtggtgtttttggcatcatgtcgcagggcgccatgcgtgccgttgttcccattatcccattccttttggttcttgtcggtgtatcgggggttcccaccaacgtctcctccaccacccaaccccaactccagaccaccggtcgtccctcgcatgaagcccccaacatgacccagaccggcaccaccgactctcccaccgccatcagccttaccacgcccgaccacacaccccccatgccaagtattggactggaggaggaggaagaggaggagggggccggggacggcgaacatcttgaggggggagatgggacccgtgacaccctaccccagtccccgggcccagccttcccgttggctgaggacgtcgagaaggacaaacccaaccgtcccgtagtcccatcccccgatcccaacaactcccccgcgcgccccgagaccagtcgcccgaagacaccccccaccattatcgggccgctggcaactcgccccacgacccgactcacctcaaagggacgacccttggttccgacgcctcaacataccccgctgttctcgttcctcactgcctcccccgccctggacaccctcttcgtcgtcagcaccgtcatccacaccttatcgtttttgtgtattggtgcgatggcgacacacctgtgtggcggttggtccagacgcgggcgacgcacacaccctagcgtgcgttacgtgtgcctgccgtccgaacgcgggtagggtatggggcgggggatggggagagcccacatgcggaaagcaagaacaataaaggcggtggtatctagttgatatgcatctctgggtgtttttggggtgtggcggacgcggggcggtcattggacggggtgcagttaaatacatgcccgggacccatgaagcatgcgcgacttccgggcctcagaacccacccgaaacggccaacggacgtctgagccaggcctggctatccggagaaacagcacacgacttggcgttctgtgtgtcgcgatgtctctgcgcgcagtctggcatctggggcttttgggaagcctcgtgggggctgttcttgccgccacccatcggggacctgcggccaacacaacggaccccttaacgcacgccccagtgtcccctcaccccagccccctggggggctttgccgtccccctcgtagtcggtgggctgtgcgccgtagtcctgggggcggcatgtctgcttgagctcctgcgtcgtacgtgccgcgggtgggggcgttaccatccctacatggacccagttgtcgtataatttcccccccccccccccttctccgcgtgggtgatgtcgggtccaaactcccgacaccaccagctggcatggtataaatcaccggtgcgccccccaaaccatgtccggcagggggatgggggggcgaatgcggagggcacccaacaacaccgggctaaccaggaaatccgtggccccggcccccaataaagatcgcggtagcccggccgtgtgacactatcgtccataccgaccacaccgacgaatcccccaagggggaggggccattttacgaggaggaggggtataacaaagtctgtctttaaaaagcaggggttagggagttgttcggtcataagcttcagcgcgaacgaccaactaccccgatcatcagttatccttaaggtctcttttgtgtggtgcgttccggtatggggggggctgccgccaggttgggggccgtgattttgtttgtcgtcatagtgggcctccatggggtccgcggcaaatatgccttggtggatgcctctctcaagatggccgaccccaatcgctttcgcggcaaagaccttccggtcctggaccagctgaccgaccctccgggggtccggcgcgtgtaccacatccaggcgggcctaccggacccgttccagccccccagcctcccgatcacggtttactacgccgtgttggagcgcgcctgccgcagcgtgctcctaaacgcaccgtcggaggccccccagattgtccgcggggcctccgaagacgtccggaaacaaccctacaacctgaccatcgcttggtttcggatgggaggcaactgtgctatccccatcacggtcatggagtacaccgaatgctcctacaacaagtctctgggggcctgtcccatccgaacgcagccccgctggaactactatgacagcttcagcgccgtcagcgaggataacctggggttcctgatgcacgcccccgcgtttgagaccgccggcacgtacctgcggctcgtgaagataaacgactggacggagattacacagtttatcctggagcaccgagccaagggctcctgtaagtacgccctcccgctgcgcatccccccgtcagcctgcctctccccccaggcctaccagcagggggtgacggtggacagcatcgggatgctgccccgcttcatccccgagaaccagcgcaccgtcgccgtatacagcttgaagatcgccgggtggcacgggcccaaggccccatacacgagcaccctgctgcccccggagctgtccgagacccccaacgccacgcagccagaactcgccccggaagaccccgaggattcggccctcttggaggaccccgtggggacggtggcgccgcaaatcccaccaaactggcacataccgtcgatccaggacgccgcgacgccttaccatcccccggccaccccgaacaacatgggcctgatcgccggcgcggtgggcggcagtctcctggcagccctggtcatttgcggaattgtgtactggatgcgccgccacactcaaaaagccccaaagcgcatacgcctcccccacatccgggaagacgaccagccgtcctcgcaccagcccttgttttactagatacccccccttaatgggtgcgggggggtcaggtctgcggggttgggatgggaccttaactccatataaagcgagtctggaaggggggaaaggtggacagtcgataagtcggtagcgggggacgcgcacctgttccgcctgtcgcacccacagctttttttgcgaaccgtcccgttccgggatgccgtgccgcccgttgcagggcctggtgctcgtgggcctctgggtctgtgccaccagcctggttgtccgtggccccacggtcagtctggtatcaaactcatttgtggacgccggggccttggggcccgacggcgtagtggaggaagacctgcttattctcggggagcttcgctttgtgggggaccaggtcccccacaccacctactacgatgggggcgtagagctgtggcactaccccatgggacacaaatgcccacgggtcgtgcatgtcgtcacggtgaccgcgtgcccacgtcgccccgccgtggcattcgccctgtgtcgcgcgaccgacagcactcacagccccgcatatcccaccctggagctcaatctggcccaacagccgcttttgcgggtccagagggcaacgcgggactatgccggggtgtacgtgttacgcgtatgggtcggtgacgcgccaaacgccagcctgtttgtcctggggatggccatagccgccgaagggactctggcgtacaacggctcggcctatggctcctgcgacccgaaactgcttccgtcttcggccccgcgtctggccccggcgagcgtataccaacccgcccctaaccaggcctccaccccctcgaccaccacctccaccccctcgaccaccatccccgctccctcgaccaccatccccgctccccaagcatcgaccacgcccttccccacgggagatccaaaaccacaacctcccggggtcaaccacgaacccccatctaatgccacgcgagcgacccgcgactcgcgatacgcgctaacggtgacccagataatccagatagccatccccgcgtccatcatagccctggtgtttctggggagctgtatttgctttatacacagatgtcaacgccgctaccgacgctcccgtcgcccgatttacagcccccagatgcccacgggcatctcatgcgcggtgaacgaagcggccatggcccgcctcggagccgagctcaaatcgcatccgagcaccccccccaaatcccggcgccggtcgtcacgcacgccaatgccctccctgacggccatcgccgaagagtcggagcccgctggggcggctgggcttccgacgccccccgtggaccccacgacacccaccccaacgcctcccctgttggtataggtccacggccactggccgggagcaccacataaccgaccgcagtccctgagttgggaataaaccggtattatttacctatatccgtgtatgtcgatttctttccccccctccccggaaaccaaagaaggaagcaaagaatggatgggaggagttcaggaagccggggagagggcccgcggcgcatttaaggcgttgttgtgttgactttgcctcttctggcgggttggtgcggtgctgtttgttgggctcccattttacccgaagatcggctgctatccccgggacatggatcgcggggcggtggtggggtttcttctcggtgtttgtgttgtatcgtgcttggcgggaacgcccaaaacgtcctggagacgggtgagtgtcggcgaggacgtttcgttgcttccagctccggggcctacggggcgcggcccgacccagaaactactatgggccgtggaacccctggatgggtgcggccccttacacccgtcgtgggtctcgctgatgccccccaagcaggtgcccgagacggtcgtggatgcggcgtgcatgcgcgctccggtcccgctggcgatggcgtacgcccccccggccccatctgcgaccgggggtctacgaacggacttcgtgtggcaggagcgcgcggccgtggttaaccggagtctggttattcacggggtccgagagacggacagcggcctgtataccctgtccgtgggcgacataaaggacccggctcgccaagtggcctcggtggtcctggtggtgcaaccggccccagttccgaccccacccccgaccccagccgattacgacgaggatgacaatgacgagggcgaggacgaaagtctcgccggcactcccgccagcgggaccccccggctcccgcctccccccgcccccccgaggtcttggcccagcgcccccgaagtctcacatgtgcgtggggtgaccgtgcgtatggagactccggaagctatcctgttttcccccggggagacgttcagcacgaacgtctccatccatgccatcgcccacgacgaccagacctactccatggacgtcgtctggttgaggttcgacgtgccgacctcgtgtgccgagatgcgaatatacgaatcgtgtctgtatcacccgcagctcccagaatgtctgtccccggccgacgcgccgtgcgccgcgagtacgtggacgtctcgcctggccgtccgcagctacgcggggtgttccagaacaaaccccccaccgcgctgttcggccgaggctcacatggagcccgtcccggggctggcgtggcaggcggcctccgtcaatctggagttccgggacgcgtccccacaacactccggcctgtatctgtgtgtggtgtacgtcaacgaccatattcacgcctggggccacattaccatcagcaccgcggcgcagtaccggaacgcggtggtggaacagcccctcccacagcgcggcgcggatttggccgagcccacccacccgcacgtcggggcccctccccacgcgcccccaacccacggcgccctgcggttaggggcggtgatgggggccgccctgctgctgtctgcactggggttgtcggtgtgggcgtgtatgacctgttggcgcaggcgtgcctggcgggcggttaaaagcagggcctcgggtaaggggcccacgtacattcgcgtggccgacagcgagctgtacgcggactggagctcggacagcgagggagaacgcgaccaggtcccgtggctggcccccccggagagacccgactctccctccaccaatggatccggctttgagatcttatcaccaacggctccgtctgtatacccccgtagcgatgggcatcaatctcgccgccagctcacaacctttggatccggaaggcccgatcgccgttactcccaggcctccgattcgtccgtcttctggtaaggcgccccatcccgaggccccacgtcggtcgccgaactgggcgaccgccggcgaggtggacgtcggagacgagctaatcgcgatttccgacgaacgcggacccccccgacatgaccgcccgcccctcgccacgtcgaccgcgccctcgccacacccgcgacccccgggctacacggccgttgtctccccgatggccctccaggctgtcgacgccccctccctgtttgtcgcctggctggccgctcggtggctccggggggcttccggcctgggggccgtcctgtgtgggattgcgtggtatgtgacgtcaattgcccgaggcgcataaagggccggtggtccgcctagccgcagcaaattaaaaatcgtgagtcacagcgaccgcaacttcccacccggagctttcttccggcctcgatgacgtcccggctctccgatcccaactcctcagcgcgatccgacatgtccgtgccgctttatcccacggcctcgccagtttcggtcgaagcctactactcggaaagcgaagacgaggcggccaacgacttcctcgtacgcatgggccgccaacagtcggtattaaggcgtcgacgcagacgcacccgctgcgtcggcatggtgatcgcctgtctcctcgtggccgttctgtcgggcggatttggggcgctcctgatgtggctgctccgctaaaagaccgcatcgacacgcgcgtccttcttgtcgtctctcttcccccccatcaccccgcaatttgcacccagcctttaactacattaaattgggttcgattggcaatgttgtctcccggttgatttttgggtgggtggggagtgggtgggtggggagtgggtgggtggggagtgggtgggtggggagtgggtgggtggggagtgggtgggtggggagtgggtgggtggggagtgggtgggtggggagtgggtgggtggggagtgggtgggtggggagtggcaaggaagaaacaagcccgaccaccagacagaaaatgtaaccatacccaaaccgactctgggggctgtttgtggggtcggaaccataggatgaacaaaccaccccgtaccacccgcacccaagggtgcgggtggctcatcggcatctgtccggtatgggttgttccccacccactcgcgttcggacgtcttagaatcatggcggttttctatgccgacatcggttttctcccccgcaataagacacgatgcgataaaatctgtttgtaaaatttattaagggtacaaattgccctagcacaggggtggggttagggccgggtccccacacccaaacgcaccaaacagatgcaggcagtgggtcgagtacagccccgcgtacgaacacgtcgatgcgtgtgtcagacagcaccagaaagcacaggccatcaacaggtcgtgcatgtgtcggtgggtttggacgcggggggccatggtggtgataaagttaatggccgccgtccgccagggccacaggggcgacgtctcttggttggcccggagccactgggtgtggaccagccgcgcgtggcggcccaacatggcccctgtagccgggggcgggggatcgcgcacgtttgcagcgcacatgcgagacacctcgaccacggttcgaaagaaggcccggtggtccgcgggcaacatcaccaggtgcgcaagcgcccgggcgtccagagggtagagccctgagtcatccgaggttggctcatcgcccgggtcttgccgcaagtgcgtgtgggttgggcttccggtgggcgggacgcgaaccgcggtgtggatcccgacgcgggcccgagcgtatgctccatgttgtggggagaaggggtctgggctcgccaggggggcatacttgcccgggctatacagacccgcgagccgtacgtggttcgcggggggtgcgtggggtccggggctcccggggagaccggggctcccggggagaccggggctccctgggagaccggggttgtcgtggatccctggggtcacgcggtaccctggggtctctgggagctcgcggtactctgggttccctaggttctcggggtggtcgcggaacccggggctcccggggaacacgcggtgtcctggggattgttggcggtcggacggcttcagatggcttcgagatcgtagtgtccgcaccgactcgtagtagacccgaatctccacattgccccgccgcttgatcattatcaccccgttgcgggggtccggagatcatgcgcgggtgtcctcgaggtgcgtgaacacctctggggtgcatgccggcggacggcacgccttttaagtaaacatctgggtcgcccggcccaactggggccgggggttgggtctggctcatctcgagagccacgggggggaaccaccctccgcccagagactcgggtgatggtcgtacccgggactcaacgggttaccggattacggggactgtcggtcacggtcccgccggttcttcgatgtgccacacccaaggatgcgttgggggcgatttcgggcagcagcccgggagagcgcagcaggggacgctccgggtcgtgcacggcggttctggccgcctcccggtcctcacgcccccttttattgatctcatcgctcccccccgacgagcaggaagcggtccacgcaacggtcgccgccggtcgcctcgacgaggacgttcctcctgcgggaaggcacgaacgcgggtgagccccctcctccgcccccgcgtcccccctcctccgcccccgcgtcccccctcctccgcccccgcgtcccccctcctccgcccccgcgtcccccctcctccgcccccgcgtccccccctcctccgcccacccaaggtgcttacccgtgcaaaaaaggcggaccggtgggtttctgtcgtcggaggcccccggggtgcgtcccctgtgtttcgtgggtggggtgggcgggtctttcccccccgcgtccgcgtgtccctttccgatgcgatcccgatcccgagccggggcgtcgcgatgccgacgccgtccgctccgacggccctctgcgactcccgctcccggtccgcgtgctccgcagccgctcccgtcgttcgtggccggcgccgtctgcgggcgtcggtcgcgccgggcctttatgtgcgccggagagacccgccccccgccgcccgggcccgcccccggggccggcgcggagtcgggcacggcgccagtgctcgcacttcgccctaataatatatatatattgggacgaagtgcgaacgcttcgcgttctcacttcttttacccggcggccccgcccccttggggcggtcccgcccgccggccaatgggggggcggcaaggcgggcggcccttgggccgcccgccgtcccgttggtcccggcgtccggcgggcgggaccggggggcccggggacggccaacgggcgcgcggggctcgtatctcattaccgccgaaccgggaagtcggggcccgggccccgccccctgcccgttcctcgttagcatgcggaacggaagcggaaaccgccggatcgggcggtaatgagatgccatgcggggcggggcgcggacccacccgccctcgcgccccgcccatggcagatggcgcggatgggcggggccgggggttcgaccaacgggccgcggccacgggcccccggcgtgccggcgtcggggcggggtcgtgcataatggaattccgttcggggtgggcccgccgggggggcggggggccggcggcctccgctgctcctccttcccgccggcccctgggactatatgagcccgaggacgccccgatcgtccacacggagcgcggctgccgacacggatccacgacccgacgcgggaccgccagagacagaccgtcagacgctcgccgcgccgggacgccgatacgcggacgaagcgcgggagggggatcggccgtccctgtcctttttcccacccaagcatcgaccggtccgcgctagttccgcgtcgacggcgggggtcgtcggggtccgtgggtctcgccccctccccccatcgagagtccgtaggtgacctaccgtgctacgtccgccgtcgcagccgtatccccggaggatcgccccgcatcggcgatggcgtcggagaacaagcagcgccccggctccccgggccccaccgacgggccgccgcccaccccgagcccagaccgcgacgagcggggggccctcgggtggggcgcggagacggaggagggcggggacgaccccgaccacgaccccgaccacccccacgacctcgacgacgcccggcgggacgggagggcccccgcggcgggcaccgacgccggcgaggacgccggggacgccgtctcgccgcgacagctggctctgctggcctccatggtagaggaggccgtccggacgatcccgacgcccgaccccgcggcctcgccgccccggacccccgcctttcgagccgacgacgatgacggggacgagtacgacgacgcagccgacgccgccggcgaccgggccccggcccggggccgcgaacgggaggccccgctacgcggcgcgtatccggaccccacggaccgcctgtcgccgcgcccgccggcccagccgccgcggagacgtcgtcacggccggtggcggccatcggcgtcatcgacctcgtcggactccgggtcctcgtcctcgtcgtccgcatcctcttcgtcctcgtcgtccgacgaggacgaggacgacgacggcaacgacgcggccgaccacgcacgcgaggcgcgggccgtcgggcggggtccgtcgagcgcggcgccggcagcccccgggcggacgccgcccccgcccgggccaccccccctctccgaggccgcgcccaagccccgggcggcggcgaggacccccgcggcctccgcgggccgcatcgagcgccgccgggcccgcgcggcggtggccggccgcgacgccacgggccgcttcacggccgggcagccccggcgggtcgagctggacgccgacgcggcctccggcgccttctacgcgcgctatcgcgacgggtacgtcagcggggagccgtggcccggcgccgggcccccgcccccggggcgggtgctgtacggcggcctgggcgacagccgcccgggcctctggggggcgcccgaggcggaggaggcgcgacgccggttcgaggcctcgggcgccccggcggccgtgtgggcgcccgagctgggcgacgccgcgcagcagtacgccctgatcacgcggctgctgtacaccccggacgcggaggccatggggtggctccagaacccgcgcgtggtccccggggacgtggcgctggaccaggcctgcttccggatctcgggcgccgcgcgcaacagcagctccttcatcaccggcagcgtggcgcgggccgtgccccacctgggctacgccatggcggccggccgcttcggctggggcctggcgcacgcggcggccgccgtggccatgagccgccgatacgaccgcgcgcagaagggcttcctgctgaccagcctgcgccgcgcctacgcgcccctgttggcgcgcgagaacgcggcgctgacgggggccgcggggagccccggcgccggcgcagatgacgagggggtcgccgccgtcgccgccgccgcaccgggcgagcgcgcggtgcccgccgggtacggcgccgcggggatcctcgccgccctggggcggctgtccgccgcgcccgcctcccccgcggggggcgacgaccccgacgccgcccgccacgccgacgccgacgacgacgccgggcgccgcgcccaggccggccgcgtggccgtcgagtgcctggccgcctgccgcgggatcctggaggcgctggccgagggcttcgacggcgacctggcggccgtcccggggctggccggggcccggcccgccagccccccgcggccggagggacccgcgggccccgcttccccgccgccgccgcacgccgacgcgccccgcctgcgcgcgtggctgcgcgagctgcggttcgtgcgcgacgcgctggtgctcatgcgcctgcgcggggacctgcgcgtggccggcggcagcgaggccgccgtggccgccgtgcgcgccgtgagcctggtcgccggggccctgggccccgcgctgccgcgggacccgcgcctgccgagctccgcggccgccgccgccgcggacctgctgtttgacaaccagagcctgcgccccctgctggcggcggcggccagcgcaccggacgccgccgacgcgctggcggccgccgccgcctccgccgcgccgcgggaggggcgcaagcgcaagagtcccggcccggcccggccgcccggaggcggcggcccgcgacccccgaagacgaagaagagcggcgcggacgcccccggctcggacgcccgcgcccccctccccgcgcccgcgcccccctccacgcccccggggcccgagcccgcccccgcccagcccgcggcgccccgggccgccgcggcgcaggcccgcccgcgccccgtggcgctgtcgcgccggcccgccgagggccccgaccccctgggcggctggcggcggcagcccccggggcccagccacacggcggcgcccgcggccgccgccctggaggcctactgctccccgcgcgccgtggccgagctcacggaccacccgctgttccccgtcccctggcgaccggccctcatgtttgacccgcgggccctggcctcgatcgccgcgcggtgcgccgggcccgcccccgccgcccaggccgcgtgcggcggcggcgacgacgacgataacccccacccccacggggccgccgggggccgcctctttggccccctgcgcgcctcgggcccgctgcgccgcatggcggcctggatgcgccagatccccgaccccgaggacgtgcgcgtggtggtgctgtactcgccgctgccgggcgaggacctggccggcggcggggcctcgggggggccgccggagtggtccgccgagcgcggcgggctgtcctgcctgctggcggccctggccaaccggctgtgcgggccggacacggccgcctgggcgggcaactggaccggcgcccccgacgtgtcggcgctgggcgcacagggcgtgctgctgctgtccacgcgggacctggccttcgccggggccgtggagtttctggggctgctcgccagcgccggcgaccggcggctcatcgtggtcaacaccgtgcgcgcctgcgactggcccgccgacgggcccgcggtgtcgcggcagcacgcctacctggcgtgcgagctgctgcccgccgtgcagtgcgccgtgcgctggccggcggcgcgggacctgcgccgcacggtgctggcctcgggccgcgtgttcggcccgggggtcttcgcgcgcgtggaggccgcgcacgcgcgcctgtaccccgacgcgccgccgctgcgcctgtgccgcggcggcaacgtgcgctaccgcgtgcgcacgcgcttcggcccggacacgccggtgcccatgtccccgcgcgagtaccgccgggccgtgctgccggcgctggacggccgggcggcggcctcggggaccaccgacgccatggcgcccggcgcgccggacttctgcgaggaggaggcccactcgcaccgcgcctgcgcgcgctggggcctgggcgcgccgctgcggcccgtgtacgtggcgctggggcgcgaggcggtgcgcgccggcccggcccggtggcgcgggccgcggagggacttttgcgcccgcgccctgctggagcccgacgacgacgcccccccgctggtgctgcgcggcgacgacgacggcccgggggccctgccgccggcgccgcccgggattcgctgggcctcggccacgggccgcagcggcaccgtgctggcggcggcgggggccgtggaggtgctgggggcggaggcgggcttggccacgcccccgcggcgggaagttgtggactgggaaggcgcctgggacgaagacgacggcggcgcgttcgagggggacggggtgctgtaacgggccgggacggggcggggcgcttgtgagacccgaagacgcaataaacggcaacaacctgattaagttttgcagtagcgttgtttattcgaggggcgggagggggcgaggggcgggagggggcgaggggcgggagggggcgaggggcgggagggggcgaggggcgggagggggcgaggggcgggagggggcgaggggcgggagggggcgaggggcgggagggggcgaggggcgggagggggcgaggggcgggagggggcgaggggcgggagggggcgaggggcgggagggggcgaggggcgggagggggcgaggggcgggagggggcgaggggcgggagggggcgaggggcgggagggggcgaggggcgggagggggcgaggggcgggagggggcgaggggcgggagggggcgaggggcggtggtggtgcgcgggcgcccccggagggtttggatctctgacctgagattggcggcactgaggtagagatgcccgaacccccccgagggagcgcgggacgcggccggggagggctggggccggggagggctggggccggggagggctggggccggggagggctggggccggggagggctggggccggggagggctggggccggggagggctggggccggggagggctggggctggggaggggcggtggtgtgtagcaggagcggtgtgttgcgccggggtacgtctggaggagcgggaggtgcgcggtgacgtgtggatgaggaacaggagttgttgcgcggtgagttgtcgctgtgagttgtgttgttgggcaggtgtggtggatgacgtgacgtgtgacgtgcggagtgcgccgtgctctgttggtttcacctgtggcagcccgggccccccgcgggcgcgcgcgcgcgcaaaaaaggcgggcggcggtccgggcggcgtgcgcgcgcgcggcgggcgtggggggcggggccgcgggagcggggggaggagcggggggaggagcggggggaggagcggggggaggagcggggggaggagcggggggaggagcggggggaggagcggggggaggagcggggggaggagcggggggaggagcggggggaggagcggggggaggagcggggggaggagcggggggaggagcggggggaggagcggggggaggagcggggggaggagcggggggaggagcggccagaccccgaaaacgggccccccccaaaacacaccccccgggggtcgcgcgcggccctttaaagcggcggcggcgggc

SEQ ID NO: 17 - DNA, 20 bp, Artificial Sequence
  Synthetic oligonucleotide
acccccacatcgaccccaaa

SEQ ID NO: 18 - DNA, 19 bp, Artificial Sequence
  Synthetic oligonucleotide
accccacatcgaccccaaa

SEQ ID NO: 19 - protein, 11 aa, Artificial Sequence
  Synthetic peptide
VTPTSTPNPNN

SEQ ID NO: 20 - protein, 11 aa, Artificial Sequence
  Synthetic peptide
VTPHRPQTPTM

SEQ ID NO: 21 - protein, 10 aa, Artificial Sequence
  Synthetic peptide
PAPDLEEVLT

SEQ ID NO: 22 - protein, 4 aa, Artificial Sequence
  Synthetic peptide
RLPT

SEQ ID NO: 23 - DNA, 151381 bp, Artificial Sequence
  Recombinant HSV-1
agcccgggccccccgcgggcgcgcgcgcgcgcaaaaaaggcgggcggcggtccgggcggcgtgcgcgcgcgcggcgggcgtggggggcggggccgcgggagcggggggaggagcggggggaggagcggggggaggagcggggggaggagcggggggaggagcggggggaggagcggggggaggagcggggggaggagcggggggaggagcggggggaggagcggggggaggagcggggggaggagcggggggaggagcggggggaggagcggggggaggagcggggggaggagcggggggaggagcggggggaggagcggccagaccccgaaaacgggccccccccaaaacacaccccccgggggtcgcgcgcggccctttaaagcggcggcggcgggcagcccgggccccccgcggccgagactagcgagttagacaggcaagcactactcgcctctgcacgcacatgcttgcctgtcaaactctaccaccccggcacgctctctgtctccatggcccgccgccgccgccatcgcggcccccgccgcccccggccgcccgggcccacgggcgccgtcccaaccgcacagtcccaggtaacctccacgcccaactcggaacccgcggtcaggagcgcgcccgcggccgccccgccgccgccccccgccggtgggcccccgccttcttgttcgctgctgctgcgccagtggctccacgttcccgagtccgcgtccgacgacgacgatgacgacgactggccggacagccccccgcccgagccggcgccagaggcccggcccaccgccgccgccccccggccccggcccccaccgcccggcgtgggcccggggggcggggctgacccctcccaccccccctcgcgccccttccgccttccgccgcgcctcgccctccgcctgcgcgtcaccgcggagcacctggcgcgcctgcgcctgcgacgcgcgggcggggagggggcgccggagccccccgcgacccccgcgacccccgcgacccccgcgacccccgcgacccccgcgcgggtgcgcttctcgccccacgtccgggtgcgccacctggtggtctgggcctcggccgcccgcctggcgcgccgcggctcgtgggcccgcgagcgggccgaccgggctcggttccggcgccgggtggcggaggccgaggcggtcatcgggccgtgcctggggcccgaggcccgtgcccgggccctggcccgcggagccggcccggcgaactcggtctaacgttacacccgaggcggcctgggtcttccgcggagctcccgggagctccgcaccaagccgctctccggagagacgatggcaggagccgcgcatatatacgcttggagccagcccgccctcacagggcgggcccgcctcgggggcgggactggccaatcggcggccgccagcgcggcggggcccggccaaccagcgtccgccgagtcttcggggcccggcccattgggcgggagttaccgcccaatgggccgggccgcccacttcccggtatggtaattaaaaacttgcaagaggccttgttccgcttcccggtatggtaattagaaactcattaatgggcggccccggccgcccttcccgcttccggcaattcccgcggcccttaatgggcaaccccggtattccccgcctcccgcgccgcgcgtaaccactcccctggggttccgggttatgctaattgcttttttggcggaacacacggcccctcgcgcattggcccgcgggtcgctcaatgaacccgcattggtcccctggggttccgggtatggtaatgagtttcttcgggaaggcgggaagccccggggcaccgacgcaggccaagcccctgttgcgtcggcgggaggggcatgctaatggggttctttgggggacaccgggttgggcccccaaatcgggggccgggccgtgcatgctaatgatattctttgggggcgccgggttggtccccggggacggggccgccccgcggtgggcctgcctcccctgggacgcgcggccattgggggaatcgtcactgccgcccctttggggaggggaaaggcgtggggtataagttagccctggcccgacagtctggtcgcatttgcacctcggcactcggagcgagacgcagcagccaggcagactcgggccgccccctctccgcatcaccacagaagccccgcctacgttgcgacccccagggaccctccgtccgcgaccctccagccgcatacgacccccagttattaatagtaatcaattacggggtcattagttcatagcccatatatggagttccgcgttacataacttacggtaaatggcccgcctggctgaccgcccaacgacccccgcccattgacgtcaataatgacgtatgttcccatagtaacgccaatagggactttccattgacgtcaatgggtggagtatttacggtaaactgcccacttggcagtacatcaagtgtatcatatgccaagtacgccccctattgacgtcaatgacggtaaatggcccgcctggcattatgcccagtacatgaccttatgggactttcctacttggcagtacatctacgtattagtcatcgctattaccatggtgatgcggttttggcagtacatcaatgggcgtggatagcggtttgactcacggggatttccaagtctccaccccattgacgtcaatgggagtttgttttggcaccaaaatcaacgggactttccaaaatgtcgtaacaactccgccccattgacgcaaatgggcggtaggcgtgtacggtgggaggtctatataagcagagctcgtttagtgaaccgtcagatcgatgtggctgcagagcctgctgctcttgggcactgtggcctgcagcatctctgcacccgcccgctcgcccagccccagcacgcagccctgggagcatgtgaatgccatccaggaggcccggcgtctcctgaacctgagtagagacactgctgctgagatgaatgaaacagtagaagtcatctcagaaatgtttgacctccaggagccgacctgcctacagacccgcctggagctgtacaagcagggcctgcggggcagcctcaccaagctcaagggccccttgaccatgatggccagccactacaagcagcactgccctccaaccccggaaacttcctgtgcaacccagattatcacctttgaaagtttcaaagagaacctgaaggactttctgcttgtcatcccctttgactgctgggagccagtccaggagtgaaataaagcaatagcatcacaaatttcacaaataaagcattattttgtgaggcggggggcggcaaggaccctgggggaggaggaggaggagggggggggagggaggaataggcgggcgggcgaggaaagggcgggccggggagggggcgtaacctgatcgcgccccccgttgtctcttgcagcagactacgtaccgcccgccccccgccggacgccccgcgcccccccacgcagaggcgccgccgcgccccccgtgacgggcggggcgtctcacgcagccccccagccggccgcggctcggacagcgcccccctcggcgcccatcgggccacacggcagcagtaacaccaacaccaccaccaacagcagcggcggcggcggctcccgccagtcgcgagccgcggcgccgcggggggcgtctggcccctccgggggggttggggttggggttggggttgttgaagcggaggcggggcggccgaggggccggacgggcccccttgtcaacagacccgccccccttgcaaacaacagagaccccatagtgatcagcgactcccccccggcctctccccacaggccccccgcggcgcccatgccaggctccgccccccgccccgggccccccgcgtccgcggccgcgtcgggacccgcgcgcccccgcgcggccgtggccccgtgcgtgcgagcgccgcctccggggcccggcccccgcgccccggcccccggggcggagccggccgcccgccccgcggacgcgcgccgtgtgccccagtcgcactcgtccctggctcaggccgcgaaccaagaacagagtctgtgccgggcgcgtgcgacggtggcgcgcggctcgggggggccgggcgtggagggtgggcacgggccctcccgcggcgccgccccctccggcgccgccccgctcccctccgccgcctctgtcgagcaggaggcggcggtgcgtccgaggaagaggcgcgggtcgggccaggaaaacccctccccccagtccacgcgtccccccctcgcgccggcaggggccaagagggcggcgacgcaccccccctccgactcagggccgggggggcgcggccagggtgggcccgggacccccctgacgtcctcggcggcctccgcctcttcctcctctgcctcttcctcctcggccccgacccccgcgggggccgcctcttccgccgccggggccgcgtcctcctccgcttccgcctcctcgggcggggccgtcggtgccctgggagggagacaagaggaaacctccctcggcccccgcgctgcttctgggccgcgggggccgaggaagtgtgcccggaagacgcgccacgcggagacttccggggccgtccccgcgggcggcctcacgcgctacctgcccatctcgggggtctctagcgtggtcgccctgtcgccttacgtgaacaagactatcacgggggactgcctgcccatcctggacatggagacggggaacatcggggcgtacgtggtcctggtggaccagacgggaaacatggcgacccggctgcgggccgcggtccccggctggagccgccgcaccctgctccccgagaccgcgggtaaccacgtgatgccccccgagtacccgacggcccccgcgtcggagtggaacagcctctggatgacccccgtggggaacatgctgttcgaccagggcaccctagtgggcgccctggacttccgcagcctgcggtctcggcacccgtggtccggggagcagggggcgtcgacccgggacgagggaaaacaataagggacgccccccgtgtttgtggggaggggggggtcgggcgctgggtggtctctggccgcgcccactacaccagccaatccgtgtcggggaggggaaaagtgaaagacacgggcaccacacaccagcgggtcttttgtgttggccctaataaaaaaaaactcaggggatttttgctgtctgttgggaaataaaggtttacttttgtatcttttccctgtctgtgttggatgtatcgcggggatgcgtgggagtgggggtgcgtgggagtgggggtgcgtgggagtgggggtgcgtgggagtgggggtgcgtgggagtgggggtgcgtgggagtgggggtgcgtgggagtgggggtgcgtgggagtgggggtgcgtgggagtgggggtgccatgttgggcaggctctggtgttaaccacagagccgcggcccgggctgcctgaccaccgatccccgaaagcatcctgccactggcatggagccagaaccacagtgggttgggtgtgggtgttaagtttccgcgagcgcctgcccgcccggactgacctggcctctggccgccacaaagggcggggggggttaactacactatagggcaacaaaggatgggaggggtggcggggcgggacggggcgcccaaaagggggtcggccacaccacagacgtgggtgttggggggtggggcggaggggtgggggggggggagacagaaacaggaacatagttagaaaacaagaatgcggtgcagccagagaatcacaggagacgaggggatgggcgtgttggttaccaacccacacccaggcatgctcggtggtatgaaggagggggggcggtgcttcttagagaccgccgggggacgtggggttggtgtgcaaaggcacgcgcacccgcgccggccaggtgggccggtactccatccccccctcccccgacccttcccacccccgcgtgccagagatcaccccggtcccccggcacccgccactcctccgtatcctcgctttaggaacaactttagggggggtacacacgcgccgtgcatttccttccacaccccccctcccccgcactccccccccccaggcagtaagacccaagcatagagagccaggcacaaaaacacaggcggggtgggacacatgccttcttggagtacgtgggtcattggcgtggggggttacagcgacaccggccgaccccctggcggtcttccagccggcccttagataagggggcagttggtggtcggacgggtaagtaacagagtctgactaagggtgggagggggggaaaagaacgggctggtgtgctgtaacacgagcccacccgcgagtggcgtggccgaccttagcctctggggcgccccctgtcgtttgggtcccccccctctattggggagaagcaggtgtctaacctacctggaaacgcggcgtctttgttgaacgacaccggggcgccctcgacgagtgggataacgggggaggaagggagggaggagggtactgggggtgaagaaggggggggggagaagcgagaacaggaaaggcgatggagcccggcagaacaccgaggaaaaaaaaaccacagcgcatgcgccgggccgttgtggggccccgggccggggccccttgggtccgccggggccccgggccgggccgccacgggggccggccgttggcggtaaccccgagtgttcatctcaggccccgggccgggaacccggaaaagcctccggggggcctttttcgcgtcgcgtgccggcgagcgggtccggacggggcccggaccgccgcggtcgggggcccctcgtcccgggccgtacgcggccttcgccccgtgaggggacagacgaacgaaacattccggcgacggaacgaaaaacaccccagacgggttaaagaaacagaaaccgcaacccccaccacccccgaaacggggaaaacgaaaaaacagaccagcggccggccggcgcttagggggaggatgtcgccgacgccccttggccgccccggctgcaggggggcccggagagccgcggcacccggacgcgcccggaaagtctttcgcaccacccgcgatcggcacggccgcgcccccgcttttataaaggctgagatgacgcagcaaaaacaggccacagcaccacgtgggtaggtgatgtaattttattttcctcgtctgcggcctaatggatttccgggcgcggtgcccctgtctgcagagcacttaacggattgatatctcgcgggcacgcgcgcccttaatggaccggcgcggggcggggggccggatacccacacgggcggggggggggtgtcgcgggccgtctgctggcccgcggccacataaacaatgactctgggcctttctgcctctgccgcttgtgagtgcgcgcgccggctctgcggtgtcggcggcggctgcggcggctgcggcggccgccgtgttcggtctcggtagccggccggcgggtggactcgcggggggccggagggtggaaggcaggggggtgtaggatgggtatcaggacttccacttcccgtccttccatcccccgttcccctcggttgttcctcgcctcccccaacaccccgccgctttccgttggggttgttattgttgtcgggatcgtgcgggccgggggtcgccggggcaggggcgggggcgtgggcgggggtgctcgtcgatcgaccgggctcagtgggggcgtggggtgggtgggagaaggcgaggagactggggtgggggtgtcggtgggtggttgttttttgtggttgtttttgtgtctgttcccgtcccccgtcaccccctccctccgtcccctccgtccccccgtcgcgggtgtttgtgtttgtttattccgacattggtttatttaaataaacacagccgttctgcgtgtctgttcttgcgtgtggctgggggcttatatgtggggtcccgggggcgggatggggtttagcggcggggggcggcgcgccggacggggcgctggagataacggcccccggggaacgggggaccggggctgggtatcccgaggtgggtgggtgggcggcggtggccgggccgggccgggccgggccgggccgggtgggcggggtttggaaaaacgaggaggaggaggagaaggcgggggggggggagacggggggaaagcaaggacacggcccggggggtgggagcgcgggccgggccgctcgtaagagccgcgacccggccgccggggagcgttgtcgccgtcggtctgccggcccccgtccctcccttttttgaccaaccagcgccccccccccctcaccaccattcctactaccaccaccaccaccaccaccgacacctcccgcgcacccccgcccacatccccccccaacccgcaccaccagcacgggttgggggtagcaggggatcaaaggggggcaaagccggcggggcggttcggggggggggggggggggcgggagaccaagtaggcccgcccatccgcggcccctcccggcagccacgcccccagcgtcgggtgtcacggggaaagagcagaggggagaggggagagggggggagaggggagagggggggagaggggagagggggggagaggggagagggggggagaggggagagggggggagaggggagagggggggagaggggagagggggggagaggggagagggggggagaggggagagggggggagaggggagagggggggagagggggtatataaaccaacgaaaagcgcgggaacggggatacggggcttgtgtggcacgacgtcgtggttgtgttactgggcaaacacttggggactgtaggtttctgtgggtgccgaccctaggcgctatggggattttgggttgggtcgggcttattgccgttggggttttgtgtgtgcgggggggcttgccttcaaccgaatatgttattcggagtcgggtggctcgagaggtgggggatatattaaaggtgccttgtgtgccgctcccgtctgacgatcttgattggcgttacgagaccccctcggctataaactatgctttgatagacggtatatttttgcgttatcactgtcccggattggacacggtcttgtgggataggcatgcccagaaggcatattgggttaacccctttttatttgtggcgggttttttggaggacttgagttaccccgcgtttcctgccaacacccaggaaacagaaacgcgcttggccctttataaagagatacgccaggcgctggacagtcgcaagcaggccgccagccacacacctgtgaaggctgggtgtgtgaactttgactattcgcgcacccgccgctgtgtagggcgacaggatttgggacctaccaacggaacgtctggacggaccccggttctgccgccggacgatgaagcgggcctgcagccgaagcccctcaccacgccgccgcccatcatcgccacgtcggaccccaccccgcgacgggacgccgccacaaaaagcagacgccgacgaccccactcccggcgcctctaacgatgcctcgacggaaacccgtccgggttcggggggcgaaccggccgcctgtcgctcgtcagggccggcgggcgctcctcgccgccctagaggctgtcccgctggtgtgacgttttcctcgtccgcgccccccgaccctcccatggatttaacaaacgggggggtgtcgcctgcggcgacctcggcgcctctggactggaccacgtttcggcgtgtgtttctgatcgacgacgcgtggcggcccctgatggagcctgagctggcgaaccccttaaccgcccacctcctggccgaatataatcgtcggtgccagaccgaagaggtgctgccgccgcgggaggatgtgttttcgtggactcgttattgcacccccgacgaggtgcgcgtggttatcatcggccaggacccatatcaccaccccggccaggcgcacggacttgcgtttagcgtgcgcgcgaacgtgccgcctcccccgagtcttcggaatgtcttggcggccgtcaagaactgttatcccgaggcacggatgagcggccacggttgcctggaaaagtgggcgcgggacggcgtcctgttactaaacacgaccctgaccgtcaagcgcggggcggcggcgtcccactctagaatcggttgggaccgcttcgtgggcggagttatccgccggttggccgcgcgccgccccggcctggtgtttatgctctggggcacacacgcccagaatgccatcaggccggaccctcgggtccattgcgtcctcaagttttcgcacccgtcgcccctctccaaggttccgttcggaacctgccagcatttcctcgtggcgaaccgatacctcgagacccggtcgatttcacccatcgactggtcggtttgaaaggcatcgacgtccggggtttttgtcggtgggggcttttgggtatttccgatgaataaagacggttaatggttaaacctctggtctcatacgggtcggtgatgtcgggcgtcgggggagagggagttccctctgcgcttgcgattctagcctcgtggggctggacgttcgacacgccaaaccacgagtcggggatatcgccagatacgactcccgcagattccattcggggtgccgctgtggcctcacctgaccaacctttacacgggggcccggaacgggaggccacagcgccgtctttctccccaacgcgcgcggatgacggcccgccctgtaccgacgggccctacgtgacgtttgataccctgtttatggtgtcgtcgatcgacgaattagggcgtcgccagctcacggacaccatccgcaaggacctgcggttgtcgctggccaagtttagcattgcgtgcaccaagacctcctcgttttcgggaaacgccccgcgccaccacagacgcggggcgttccagcgcggcacgcgggcgccgcgcagcaacaaaagcctccagatgtttgtgttgtgcaaacgcgcccacgccgctcgagtgcgagagcagcttcgggtcgttattcagtcccgcaagccgcgcaagtattacacgcgatcttcggacgggcggctctgccccgccgtccccgtgttcgtccacgagttcgtctcgtccgagccaatgcgcctccaccgagataacgtcatgctggcctcgggggccgagtaaccgccccccccccatgccaccctcactgcccgtcgcgcgtgtttgatgttaataaataacacataaatttggctggttgtttgttgtctttaatggaccgcccgcaagggggggggggcatttcagtgtcgggtgacgagcgcgatccggccgggatcctaggaccccaaaagtttgtctgcgtattccagggcggggctcagttgaatctcccgcagcacctctaccagcaggtccgcggtgggctggagaaactcggccgtcccggggcaggcggttgtcgggggtggaggcgcggcgcccaccccgtgtgccgcgcctggcgtctcctctgggggcgacccgtaaatggttgcagtgatgtaaatggtgtccgcggtccagaccacggtcaaaatgccggccgtggcgctccgggcgctttcgccgcgcgaggagctgacccaggagtcgaacggatacgcgtacatatgggcgtcccacccgcgttcgagcttctggttgctgtcccggcctataaagcggtaggcacaaaattcggcgcgacagtcgataatcaccaacagcccaatgggggtgtgctggataacaacgcctccgcgcggcaggcggtcctggcgctcccggccccgtaccatgatcgcgcgggtgccgtactcaaaaacatgcaccacctgcgcggcgtcgggcagtgcgctggtcagcgaggccctggcgtggcataggctatacgcgatggtcgtctgtggattggacatctcgcggtgggtagtgagtcccccgggccgggttcggtggaactgtaaggggacggcgggttaatagacaatgaccacgttcggatcgcgcagagccgatagtatgtgctcactaatgacgtcatcgcgctcgtggcgctcccggagcggatttaagttcatgcgaaggaattcggaggaggtggtgcgggacatggccacgtacgcgctgttgaggcgcaggttgccgggcgtaaagcagatggcgaccttgtccaggctaaggccctgggagcgcgtgatggtcatggcaagcttggagctgatgccgtagtcggcgtttatggccatggccagctccgtagagtcaatggactcgacaaactcgctgatgttggtgttgacgacggacatgaagccgtgttggtcccgcaagaccacgtaaggcaggggggcctcttccagtaactcggccacgttggccgtcgcgtgccgcctccgcagctcgtccgcaaaggcaaacacccgtgcgtacgtgtatcccatgagcgtataattgtccgtctgcagggcgacggacatcagccccccgcgcggcgagccggtcagcatctcgcagccccggaagataacgttgtccacgtacgtgctaaagggggcgacttcaaatgcctccccgaagagctcttggaggattcggaatctcccgaggaaggcccgcttcagcagcgcaaactgggtgtgaacggcggcggtggtctccggttccccgggggtgtagtggcagtaaaacacgtcgagctgttgttcgtccagccccgcgaaaataacgtcgaggtcgtcgtcgggaaaatcgtccgggcccccgtcccgcggccccagttgcttaaaatcaaacgcacgctcgccgggggcgcctgcgtcggccattaccgacgcctgcgtcggcacccccgaagatttggggcgcagagacagaatctccgccgttagttctcccatgcgggcgtaggcgagggtcctctgggtcgcatccaggcccgggcgctgcagaaagttgtaaaaggagataagcccgctaaatatgagccgcgacaggaacctgtaggcaaactccaccgaagtctccccctgagtctttacaaagctgtcgtcacgcaacactgcctcgaaggcccggaacgtcccactaaacccaaaaaccagttttcgcaggcgcgcggtcaccgcgatctggctgttgaggacgtaagtgacgtcgttgcgggccacgaccagctgctgtttgctgtgcacctcgcagcgcatgtgccccgcgtcctggtcctggctctgcgagtagttggtgatgcggctggcgttggccgtgagccacttttcaatcgtcaggccgggctggtgtgtcagccgtcggtattcgtcaaactccttgaccgacacgaacgtaagcacggggagggtgaacacgacgaactccccctcacgggtcaccttcaggtaggcgtggagcttggccatgtacgcgctcacctctttgtgggaggagaacagccgcgtccagccggggaggttggcggggttggtgatgtagttttccgggacgacgaagcgatccacgaactgcatgtgctcctcggtgatgggcaggccgtactccagcaccttcatgaggttaccgaactcgtgctcgacgcaccgtttgttgttaataaaaatggcccagctatacgagaggcgggcgtactcgcgcagcgtgcggttgcagatgaggtacgtgagcacgttctcgctctggcggacggaacaccgcagtttctggtgctcgaaggtcgactccagggacgccgtctgcgtcggcgagcccacacacaccaacacgggccgcaggcgggccgcgtactggggggtgtggtacagggcgttaatcatccaccagcaatacaccacggccgtgaggaggtgacgcccaaggagcccggcctcgtcgatgacgatcacgttgctgcgggtaaaggccggcagcgccccgtgggtggccggggccaaccgcgtcagggcgccctcggccaaccccagggtccgttccagggcggccagggcgcgaaactcgttccgcaactcctcgcccccggaggcggccagggcgcgcttcgtgaggtccaaaatcacctcccagtagtacgtcagatctcgtcgctgcaggtcctccagcgaggcggggttgctggtcagggtgtacgggtactgtcccagttgggcctggacgtgattcccgcgaaacccaaattcatgaaagatggtgttgatgggtcggctgagaaaggcgcccgagagtttggcgtacatgttttgggccgcaatgcgcgtggcgcccgtcaccacacagtccaagacctcgttgattgtctgcacgcacgtgctctttccggagccagcgttgccggtgataagatacaccgcgaacggaaactccctgaggggcaggcctgcgggggactctaaggccgccacgtcccggaaccactgcagatggggcacttgcgctccgtcgagctgttgttgcgagagctctcggatgcgcttaaggattggctgcaccccgtgcatagacgtaaaatttaaaaaggcctcggccctccctggaacggctggtcggtccccgggttgctgaaggtgcggcgggccgggtttctgtccgtctagctggcgctccccgccggccgccgccatgaccgcaccacgctcgcgggcccccactacgcgtgcgcggggggacacggaagcgctgtgctcccccgaggacggctgggtaaaggttcaccccacccccggtacgatgctgttccgcgagattctccacgggcagctggggtataccgagggccagggggtgtacaacgtcgtccggtccagcgaggcgaccacccggcagctgcaggcggcgatctttcacgcgctcctcaacgccaccacttaccgggacctcgaggcggactggctcggccacgtggcggcccgcggtctgcagccccaacggctggttcgccggtacaggaacgcccgggaggcggatatcgccggggtggccgagcgggtgttcgacacgtggcggaacacgcttaggacgacgctgctggactttgcccacgggttggtcgcctgctttgcgccgggcggcccgagcggcccgtcaagcttccccaaatatatcgactggctgacgtgcctggggctggtccccatattacgcaagcgacaagaagggggtgtgacgcagggtctgagggcgtttctcaagcagcacccgctgacccgccagctggccacggtcgcggaggccgcggagcgcgccggccccgggttttttgagctggcgctggccttcgactccacgcgcgtggcggactacgaccgcgtgtatatctactacaaccaccgccggggcgactggctcgtgcgagaccccatcagcgggcagcgcggagaatgtctggtgctgtggccccccttgtggaccggggaccgtctggtcttcgattcgcccgtccagcggctgtttcccgagatcgtcgcgtgtcactccctccgggaacacgcgcacgtctgccggctgcgcaataccgcgtccgtcaaggtgctgctggggcgcaagagcgacagcgagcgcggggtggccggtgccgcgcgggtcgttaacaaggtgttgggggaggacgacgagaccaaggccgggtcggccgcctcgcgcctcgtgcggcttatcatcaacatgaagggcatgcgccacgtaggcgacattaacgacaccgtgcgtgcctacctcgacgaggccggggggcacctgatagacgccccggccgtcgacggtaccctccctggattcggcaagggcggaaacagccgcgggtctgcgggccaggaccagggggggcgggcgccgcagcttcgccaggccttccgcacggccgtggttaacaacatcaacggcgtgttggagggctatataaataacctgtttggaaccatcgagcgcctgcgcgagaccaacgcgggcctggcgacccaattgcaggagcgcgaccgcgagctccggcgcgcaacagcgggggccctggagcgccagcagcgcgcggccgacctggcggccgagtccgtgaccggtggatgcggcagccgccctgcgggggcggacctgctccgggccgactatgacattatcgacgtcagcaagtccatggacgacgacacgtacgtcgccaacagctttcagcacccgtacatcccttcgtacgcccaggacctggagcgcctgtcgcgcctctgggagcacgagctggtgcgctgttttaaaattctgtgtcaccgcaacaaccagggccaagagacgtcgatctcgtactccagcggggcgatcgccgcattcgtcgccccctactttgagtcagtgcttcgggccccccgggtaggcgcgcccatcacgggctccgatgtcatcctgggggaggaggagttatgggatgcggtgtttaagaaaacccgcctgcaaacgtacctgacagacatcgcggccctgttcgtcgcggacgtccagcacgcagcgctgcccccgcccccctccccggtcggcgccgatttccggcccggcgcgtccccgcggggccggtccagatcgcggtcgcccggaagaactgcgcgaggcgcgccggaccagggcgggggcatcgggcaccgggatggccgccgcgacggccgacgatgaggggtcggccgccaccatcctcaagcaggccatcgccggggaccgcagcctggtcgaggcggccgaggcgattagccagcagacgctgctccgcctggcctgcgaggtgcgccaggtcggcgaccgccagccgcggtttaccgccaccagcatcgcgcgcgtcgacgtcgcgcctgggtgccggttgcggttcgttctggacgggagtcccgaggacgcctatgtgacgtcggaggattactttaagcgctgctgcggccagtccagttatcgcggcttcgcggtggcggtcctgacggccaacgaggaccacgtgcacagcctggccgtgccccccctcgttctgctgcaccggttctccctgttcaaccccagggacctcctggactttgagcttgcctgtctgctgatgtacctggagaactgcccccgaagccacgccaccccgtcgacctttgccaaggttctggcgtggctcggggtcgcgggtcgccgcacgtccccattcgaacgcgttcgctgccttttcctccgcagttgccactgggtcctaaacacactcatgttcatggtgcacgtaaaaccgttcgacgacgagttcgtcctgccccactggtacatggcccggtacctgctggccaacaacccgccccccgttctctcggccctgttctgtgccaccccgacgagctcctcattccggctgccggggccgcccccccgctccgactgcgtggcctataaccccgccgggatcatggggagctgctgggcgtcggaggaggtgcgcgcgcctctggtctattggtggctttcggagaccccaaaacgacagacgtcgtcgctgttttatcagttttgttgaattttaggaaataaacccggttttgtttctgtggcctcccgacggatgcgcgtgtccttactccgtcttggtgggtgggtggctgtgtatggcgtcccatctgtgcggggaggggggcaagtcggcacgtattcggacagactcaagcacacacgggggagcgctcttgtctcagggcaatgtttttattggtcaaactcaggcaaacagaaacgacatcttgtcgtcaaagggatacacaaacttccccccctcgccccatactcccgccagcaccccggtaaacaccaactcaatctcgcgcaggatttcgcgcaggtgatgagcgcagtccacgggggggagcacaaggggccgcgggtatagatcgacggggacgccgaccgactccccgcctccgggacagacacgcacgacgcgccgccagtagtgctctgcgtccagcaaggcgccgccgcggaaggcagtggggggcaaggggtcgctggcctcaaagggggacacccgaacgctccagtactccgcgtccaaccgtttattaaacgcgtccaagataaggcggtcgcaggcgtcctccataaggccccgggccgtgagtgcgtcctcctccggcacgcatgccgttgtcaggcccaggacccgtcgcagcgtgtcgcgtacgacccctgccgccgtggtgtacgcgggcccgcggagaggaaatcccccaagatggtcagtgttgtcgcgggagttccagaaccacactcccgcctggctccaggcgactgcgtgggtgtagacgccctcgagggccaggcacagtgggtgccgcagccggaggccgttggccctaagcacggctcccacggccgtctcgatggcccgccgggcgtcctcgatcaccccggaagccgcatccgcgtcttgggggtccacgttaaagacaccccagaacgcacccccatcgcccccgcagaccgcgaacttcaccgagctggccgtctcctcgatctgcaggcagacggcggccattaccccacccaggagctgccgcagcgcagggcaggcgttgcacgtgtccgggaccaggcgctccaagacggccccggcccagggctctgagggagcggccaccaccagcgcgtccagtcttgctaggcccgtccggccgtgggggtccgccagcccgctccccccgaggtcggccagggccgccaggagctgggcgcgaagtccggggaagcaaaaccgcgccgtccagacgggcccgacggccgcgggcgggtctaacagttggatgattttagtggcgggatgccaccgcgccaccgcctcccgcaccgcgggcaggaggcatccggctgccgccgaggccacgccgggccaggctcgcggggggaggacgaccctggcccccaccgcgggccaggcccccaggagcgcggcgtaagcggccgcggccccgcgcaccaggtcccgtgccgactcggccgtggccggcacggtgaacgtgggccaacccggaaaccccaggacggcaaagtacgggacgggtcccccccggacctcaaactcgggccccagaaaggcaaagacgggggccagggccccgggggcggcgtggaccgtggtatgccactgccggaaaagggcgacgagcgccggcgcggagaacttctcgccggcgcttacaaagtagtcgtaatcgcggggcagcagcacccgtgccgtgactcgttgcgggtgcccgcgtggccgcaggcccacctcgcacacctcgaccaggtccccgaacgcgccctccttcttgatcggcggaaacgcaagagtctggtattcgcgcgcaaatagcgcggttccggtggtgatgttaacggtcagcgaagcggcggacgcgcactggggggtgtcgcgaatggccgccaggcgcgcccacgccagccgcgcgtcgggatgctcggcaacgcgcgccgccagggccatagggtcgatgtcaatgttggcctccgcgaccaggagagcggcgcgaggggcggcgggcgggccccacgacgctctctcaactttcaccaccagtcccgtgcgtgggtccgagccgatacgcagcggggcgaacagggccaccggcccggtctggcgctccagggccgccaggacgcacgcgtacagcgcccgccacagagtcgggttctccaggggctccagcggggaggcggccggcgtcgtcgcggcgcgggcggccgccacgacggcctggacggagacgtccgcggagccgtagaaatcccgcagctccgtcgcggtgacggagacctccgcaaagcgcgcgcgaccctcccctgcggcgttgcgacatacaaaatacaccagggcgtggaagtactcgcgagcgcgggggggcagccataccgcgtaaagggtaatggcgctgacgctctcctccacccacacgatatctgcggtgtccatcgcacggcccctaaggatcacgggcggtctgtgggtcccatgctgccgtgcctggccgggcccggtgggtcgcggaaaccggtgacggggggggggcggtttttggggttggggtgggggtgggaaacggcccgggtccgggggccaacttggcccctcggtgcgttccggcaacagcgccgccggtccgcggacgaccacgtaccgaacgagtgcggtcccgagacttatagggtgctaaagttcaccgccccctgcatcatgggccaggcctcggtggggagctccgacagcgccgcctccaggatgatgtcagcgttggggttggcgctggatgagtgcgtgcgcaaacagcgcccccacgcgggcacgcgtagcttgaagcgcgcgcccgcaaactcccgcttgtgggccataagcagggcgtacagctgcctgtgggtccggcaggcgctgtggtcgatgtggtgggcgtccaacaaccccacgattgtctgtttggtgaggtttttaacgcgccccgccccgggaaacgtctgcgtgcttttggccatctgcacgccaaacagttcgccccagattatcttgaacagcgccaccgcgtggtccgtctcgctaacggacccgcgcgggggacagccgcttagggcgtcggcgacgcgcttgacggcttcctccgagagcagaagtccgtcggttacgttacagtggcccagttcgaacaccagctgcatgtagcggtcgtagtggggggtcagtaggtccagcacgtcatcggggccgaaggtcctcccagatcccccggccgccgagtcccaatgcaggcgcgcggccatggtgctgcacaggcacaacagctcccagacgggggttacgttcagggtggggggcagggccacgagctccagctctccggtgacgttgatcgtggggatgacgcccgtggcgtagtggtcatagatccgccgaaatatggcgctgctgcgggtggccatgggaacgcggagacaggcctccagcaacgccaggtaaataaaccgcgtgcgtcccatcaggctgttgaggttgcgcatgagcgcgacaatttccgccggcgcgacatcggaccggaggtatttttcgacgaaaagacccacctcctccgtctcggcggcctgggccggcagcgacgcctcgggatcccggcaccgcagctcccgtagatcgcgctgggccctgagggcgtcgaaatgtacgccccgcaaaaacagacagaagtcctttggggtcagggtatcgtcgtgtccccagaagcgcacgcgtatgcagtttagggtcagcagcatgtgaaggatgttaaggctgtccgagagacacgccagcgtgcatctctcaaagtagtgtttgtaacggaatttgttgtagatgcgcgacccccgccccagcgacgtgtcgcatgccgacgcgtcacagcgccccttgaaccggcgacacagcaggtttgtgacctgggagaactgcgcgggccactggccgcaggaactgaccacgtgattaaggagcatgggcgtaaagacgggctccgagcgcgccccggagccgtccatgtaaatcagtagctcccccttgcggagggtgcgcacccgtcccagggactggtacacggacaccatgtccggtccgtagttcatgggtttcacgtaggcgaacatgccatcaaagtgcaggggatcgaagctgaggcccacggttacgaccgtcgtgtatataaccacgcggtattggccccacgtggtcacgtccccgaggggggtgagcgagtgaagcaacagcacgcggtccgtaaactgacggcagaaccgggccacgatctccgcgaaggagaccgtcgacgaaaaaatgcagatgttatcgcccccgccaaggcgcgcttccagctccccaaagaacgtggccccccgggcgtccggagaggcgtccggagacgggccgctcggcggcccgggcgggcgcagggcagcctgcaggagctcggtccccagacgcgggagaaacaggcaccggcgcgccgaaaacccgggcatggcgtactcgccgaccaccacatgcacgtttttttcgccccggagaccgcacaggaagtccaccaactgcgcgttggcggttgcgtccatggcgatgatccgaggacaggtgcgcagcaggcgtagcattaacgcatccacgcggcccagttgctgcatcgttggcgaatagagctggcccagcgtcgacataacctcgtccagaacgaggacgtcgtagttgttcagaaggttggggcccacgcgatgaaggctttccacctggacgataagtcggtggaaggggcggtcgttcataatgtaattggtggatgagaagtaggtgacaaagtcgaccaggcctgactcagcgaaccgcgtcgctagggtctgggtaaaactccgacgacaggagacgacgagcacactcgtgtccggagagtggatcgcttcccgcagccagcggatcagcgcggtagtttttcccgaccccattggcgcgcggaccacagtcacgcacctggccgtcggggcgctcgcgttggggaaggtgacgggtccgtgctgctgccgctcgatcgttgttttcgggtgaacccggggcacccattcggccaaatcccccccgtacaacatccgcgctagcgatacgctcgacgtgtactgttcgcactcgtcgtccccaatgggacgcccggcccccagaggatctcccgactccgcgccccccacgaaaggcatgaccggggcgcggacggcgtggtgggtctggtgtgtgcaggtggcgacgtttgtggtctctgcggtctgcgtcacggggctcctcgtcctggcctctgtgttccgggcacggtttccctgcttttacgccacggcgagctcttatgccggggtgaactccacggccgaggtgcgcgggggtgtagccgtgcccctcaggttggacacgcagagccttgtgggcacttatgtaatcacggccgtgttgttgttggccgtggccgtgtatgccgtggtcggcgccgtgacctcccgctacgaccgcgccctggacgcgggccgccgtctggctgcggcccgcatggccatgccgcacgccacgctgatcgccggaaacgtctgctcttggttgctgcagatcaccgtcctgttgctggcccatcgcatcagccagctggcccacctggtttacgtcctgcactttgcgtgtctggtgtattttgcggcccatttttgcaccaggggggtcctgagcgggacgtatctgcgtcaggtgcacggcctgatggagctggccccgacccatcatcgcgtcgtcggcccggctcgcgccgtgctgacaaacgccttgctgttgggcgtcttcctgtgcacggccgacgccgcggtatccctgaataccatcgccgcgttcaactttaatttttcggccccgggcatgctcatctgcctgaccgtgctgttcgccattctcgtcgtatcgctgttgttggtggtcgagggggtgttgtgtcactacgtgcgcgtgttggtgggcccccacctgggggccgtggccgccacgggcatcgtcggcctggcctgcgagcactattacaccaacggctactacgttgtggagacgcagtggccgggggctcagacgggagtccgcgtcgccctcgccctggtcgccgcctttgccctcggcatggccgtgctccgctgcacccgcgcctatctgtatcacaggcggcaccacaccaaattttttatgcgcatgcgcgacacgcgacaccgcgcacattccgccctcaagcgcgtacgcagttccatgcgcggatcgcgagacggccgccacaggcccgcacccggcagcccgcccgggattcccgaatatgcggaagacccctacgcgatctcatacggcggccagctcgaccggtacggagattccgacggggagccgatttacgacgaggtggcggacgaccaaaccgacgtattgtacgccaagatacaacacccgcggcacctgcccgacgacgatcccatctatgacaccgttggggggtacgaccccgagcccgccgaggaccccgtgtacagcaccgtccgccgttggtagctgtttggttccgttttaataaaccgtttgtgtttaacccgaccgtggtgtatgtctggtgtgtggcgtccgatcccgttactatcaccgtccccccccccccctcaaccccggcgattgtgggttttttaaaaacgacacgcgtgcgaccgtatacagaacattgttttggtttttattcgctatcggacatggggggtggaaactgggtggcggggcaggcgcctccgggggtccgccggtgagtgtggcgcgagggggggtccgatgaacgcaggcgctgtctccccggggcccgcgtaaccccgcgcatatccgggggcacgtagaaattaccttcctcttcggactcgatatccacgacgtcaaagtcgtgggcggtcagcgagacgacctccccgtcgtcggtgatgaggacgttgtttcggcagcagcagggccgggccccggagaacgagaggcccatagctcggcgagcgtgtcgtcgaatgccaggcggctgcttcgctggatggccttatagatctccggatcgatgcggacgggggtaatgatcagggcgatcggaacggcctggttcgggagaatggacgccttgctgggtcctgcggccccgagagccccggcgccgtcctccaggcggaacgttacgccctcctccgcgctggtgcggtgcctgccgataaacgtcaccagatgcgggtggggggggcagtcggggaagtggctgtcgagcacgtagccctgcaccaagatctgcttaaagttcgggtgacgggggttcgcgaagacgggctcgcggcggaccagatccccggagctccaggacacgggggagatggtgtggcgtccgaggtcgggggcgccaaacagaagcacctccgagacaacgccgctatttaactccaccaaggcccgatccgcggcggagcaccgccttttttcgcccgaggcgtgggcctctgaccaggcctggtcttgcgtgacgagagcctcctccgggccggggacgcgcccgggcgcgaagtatcgcacgctgggcttcgggatcgaccggataaatgcccggaacgcctccggggaccggtgtgccatcaagtcctcgtacgcggaggccgtggggtcgctggggtccatggggtcgaaagcgtacttggcccggcatttgacctcgtaaaaggccaggggggtcttggggactggggccaggtagccgtgaatgtcccgaggacagacgagaatatccagggacgccccgaccatccccgtgtgaccgtccatgaggaccccacacgtatgcacgttctcttcggcgaggtcgctgggttcgtggaagataaagcgccgcgtgtcggcgccggcctcgccgccgtcgtccgcgcggcccacgcagtagcgaaacagcaggcttcgggccgtcggctcgttcacccgcccgaacatcaccgccgaagactgtacatccggccgcaggctggcgttgtgcttcagccactggggcgagaaacacggaccctgggggccccagcggagggtggatgcggtcgtgaggccccgccggagcagggcccatagctggcagtcggcctggttttgcgtggccgcctcgtaaaaccccatgaggggccggggcgccacggcgtccgcggcggccgggggcccgcggcgcgtcaggcgccataggtgccgaccgagtccgcggtccaccatacccgcctcctcgaggaccacggccagggaacacagataatccaggcgggcccagaggggaccgatggccagaggggcgcggacgccgcgcagcaacccgcgcaggtggcgctcgaacgtctcggctagtatatgggagggcagcgcgttggggatcaccgacgccgaccacatagagtcaaggtccggggagtcgggatcggcgtccgggtcgcgggcgtgggtgcccccaggagatagcggaatgtctggggtcggaggccctgaggcgtcagaaagtgccggcgacgcggcccggggcttttcgtctgcggtgtcggtggcgtgctgatcacgtggggggttaacgggcgaatgggagctcgggtccacagctgacgtcgtctggggtggggggggcaggggacggaaggtggttgtcagcggaagactgttagggcgggggcgcttgggggggctgtcggggccacgaggggtgtcctcggccagggcccagggacgcttagtcacggtgcgtcccggcggacatgctgggcctaccgtggactccatttccgagacgacgtggggggagcggtggttgagcgcgccgccgggtgaacgctgattctcacgacagcgcgtgccgcgcgcacgggttggtgtgacacaggcgggacaccagcaccaggagaggcttaagctcgggaggcagcgccaccgacgacagtatcgccttgtgtgtgtgctggtaatttatacaccgatccgtaaacgcgcgccgaatcttgggattgcggaggtggcgccggatgccctctgggacgtcatacgccaggccgtgggtgttggtctcggccgagttgacaaacagggctgggtgcagcacgcagcgataggcgagcagggccagggcgaagtccggcgacagctggttgttaaaatactggtaaccgggaaaccgggtcacgggtacgcccaggctcggggcgacgtacacgctaaccaccaactccagcagcgtctggcccagggcgtacaggtcaaccgctaacccgacgtcgtgcttcaggcggtggttggtaaattcggcccgttcgttgttaaggtatttcaccaacagctccgggggctggttatacccgtgacccaccagggtgtgaaagttggctgtggttagggcggtgggcatgccaaacatccggggggacttgaggtccggctcctggaggcaaaactgcccccgggcgatcgtggagttggagttgagggtgacgaggctaaagtcggcgaggacggcccgccggagcgagacggcgtccgaccgcagcatgacgaggatgttggcgcacttgatatccaggtggctgatcccgcaggtggtgtttaaaaacacaacggcgcgggccagctccgtgaagcactggtggagggccgtcgagaccgaggggtttgttgtgcgcagggacgccagttggccgatatacttaccgaggtccatgtcgtacgcggggaacactatctgtcgttgttgcagcgagaacccgaggggcgcgatgaagccgcggatgttgtgggtgcggccggcgcgtagaacgcactccccgaccaacagggtcgcgatgagctcaacggcaaaccactccttttcctttatggtcttaacggcaagcttatgttcgcgaatcagttggacgtcaccgtatcccccagaccccccgaagcttcgggccccggggatctcgagggtcgtgtagtgtagggcggggttgatggcgaacacggggctgcatagcttgcggatgcgcgtgagggtgaggatgtgcgagggggacgaggggggtgcggttaacgccgcctgggatctgcgcaggggcgggcggttcagtttggccgccgtaccgggcgtctcgggggacgcgcggcgatgagacgagcggctcattcgccatcgggatagtcccgcgcgaagccgctcgcggaggccggatcggtggcgggacccgtgggaggagcgggagacggcggcgtcctggagagaggggccgctggggcgcccggaggccccgtgggggttggagtgtacgtaggatgcgagccaatccttgaaggaccgttggcgtgcaccttgggggctgaggttagctgccacatgaccagcaggtcgctgtctgcgggactcatccatccttcggccaggtcgccgtctccccacagagaagcgttggtcgctgcttcctcgagttgctcctcctggtccgcaagacgatcgtccacggcgtccaggcgctcaccaagcgccggatcgaggtaccgtcggtgtgcggttagaaagtcacgacgcgccgcttgctcctccacgcgaattttaacacaggtcgcgcgctgtcgcatcatctctaagcgcgcgcgggactttagccgcgcctccaattccaagtgggccgcctttgcagccataaaggcgccaacaaaccgaggatcttgggtgctgacgccctcccggtgcagctgcagggtctggtccttgtaaatctcggctcggaggtgcgtctcggccaggcgtcggcgcagggccgcgtgggcggcatctcggtccattccgccaccctgcgggcgacccggggggtgctctgatagtctcgcgtgcccaaggcccgtgatcggggtacttcgccgccgcgacccgccacccggtgtgcgcgatgtttggtcagcagctggcgtccgacgtccagcagtacctggagcgcctcgagaaacagaggcaacttaaggtgggcgcggacgaggcgtcggcgggcctcaccatgggcggcgatgccctacgagtgccctttttagatttcgcgaccgcgacccccaagcgccaccagaccgtggtccctggcgtcgggacgctccacgactgctgcgagcactcgccgctcttctcggccgtggcgcggcggctgctgtttaatagcctggtgccggcgcaactaaaggggcgtgatttcgggggcgaccacacggccaagctggaattcctggcccccgagttggtacgggcggtggcgcgactgcggtttaaggagtgcgcgccggcggacgtggtgcctcagcgtaacgcctactatagcgttctgaatacgtttcaggccctccaccgctccgaagcctttcgccagctggtgcactttgtgcgggactttgcccagctgctcaaaacctccttccgggcctccagcctcacggagaccacgggcccccccaaaaaacgggccaaggtggacgtggccacccacggccggacgtacggcacgctggagctgttccaaaaaatgatccttatgcacgccacctactttctggccgccgtgctcctcggggaccacgcggagcaggtcaacacgttcctgcgtctcgtgtttgagatccccctgtttagcgacgcggccgtgcgccacttccgccagcgcgccaccgtgtttctcgtcccccggcgccacggcaagacctggtttctggtgcccctcatcgcgctgtcgctggcctcctttcgggggatcaagatcggctacacggcgcacatccgcaaggcgaccgagccggtgtttgaggagatcgacgcctgcctgcggggctggttcggttcggcccgagtggaccacgttaaaggggaaaccatctccttctcgtttccggacgggtcgcgcagtaccatcgtgtttgcctccagccacaacacaaacgtaagtcctcttttctttcgcatggctctcccaaggggccccgggtcgacccgacccacacccacccacccacatacacacacaaccagacgcgggaggaaagtctgccccgtgggcactgatttttattcgggatcgcttgaggaggcccgggcaacggcccgggcaacggtggggcaactcgtagcaaataggcgactgatgtacgaagagaagacacacaggcgccacccggcgctggtcggggggatgttgtccgcgccgcaccgtcccccgacgacctcttgcagacggtccgtgatgcaaggacggcggggggcctgcagcagggtgaccgtatccacgggatggccaaagagaagcggacacaggctagcatccccctggaccgccagggtacactgggccatcttggcccacagacacggggcgacgcagggacaggactccgttacgacggaggagagccacagtgcgttggcggaatcgatgtggggcggcggggcgcaggactcgcagccccccgggtggttggtgatcctggccaggagccatcccagatggcgggccctgcttcccggtggacagagcgaccccaggtcgctgtccatggcccagcagtagatctggccgctggggaggtgccaccaggcccccgggcccaaggcgcagcacgcgcccggctccgggggggtcttcgcggggaccagatacgcgccatccagctcgccgaccactggctcctccgcgagctgttcggtggttgggtcgggggtttcctccgggggggtggccgcccgtatgcgtgcgaacgtgagggtgcacaggagcggggtcagggggtgcgtcacgctccggaggtggacgatcgcgcagtagcggcgctcgcggttaaagaaaaagagggcaaagaaggtgttcgggggcaaccgcagcgccttggggcgcgtcagatacagaaaaatctcgcagaagagggcgcgcccggggtctgggttaggaagggccacctgacacagaggctcggtgaggaccgttagacaccgaaagatcttgagccgctcgtccgcccgaacgacgcgccacacaaagacggagttgacaatgcgcgcgatagagtcgacgtccgtccccaggtcgtcgactctatcgcgcgtgccgcgagctccggcccgggaatccggccggggcaaggtccccgggggaccaggcggcgccaggggccgccggggtcccagctgcgccatgccgggggcggggggagggcaaaccccagaggcgggggccaacggcgcggggaggagtgggtgggcgaggtggccgggggaaggcgcccgctagcgagaccggccgttcccggacgacaccttgcgacaaaacctaaggacagcggcccgcgcgacggggtccgagaggctaaggtaggccgcgatgttaatggtgaacgcaaagccgccgggaaagacaactatgccacagaggcggcgattaaaccccaggcagaggtaggcgtagctttccccgggcaggtattgctcgcagaccctgcgtggggctgtggaggggacggcctccatgaagcgacatttactctgctcgcgtttactgacgtcaccatccatcgccacggcgattggacgattgttaagccgcagcgtgtctccgcttgtgctgtagtagtcaaaaacgtaatggccgtcggagtcggcaaagcgggccgggaggtcgtcgccgagcgggacgacccgccgcccccgaccgccccgtccccccaggtgtgccaggacggccagggcatacgcggtgtgaaaaaaggcgtcgggggcggtcccctcgacggcgcgcatcaggttctcgaggagaatggggaagcgcctggtcacctcccccaaccacgcgcgttggtcggggccaaagtcatagcgcaggcgctgtgagattcgcgggccgccctgaagcgcggcccggatggcctggcccagggcccggaggcacgccagatgtatgcgcgcggtaaaggcgacctcggcggcgatgtcaaagggcggcaggacggggcgcgggtggcgcaggggcacctcgagcgcgggaaagcgtagcagcagctccgcctgcccagcgggagacagctggtgggggcgcacgacgcgttctgcggcgcaggcctcggtcagggccgtggccagcgccgaggacagcagcggagggcgggcgcgtcgcccgccccacgccacggagttctcgtaggagacgacgacgaagcgctgcttggttccgtagtggtggcgcaggaccacggagatagaacgacggctccacagccagtccggccggtcgccgccggccagggcttcccatccgcgatccaaccactcgaccagcgaccgcggctttgcggtaccaggggtaagggttagaacgtcgttcaggatgtcctcgcccccgggcccgtggggcgctggggccacaaagcggcccccgccggggggctccagacccgccagcaccgcatctgcgtcagccgcccccatggcgcccccgctgacggcctggtgaaccagggcgccctggcgtagccccgatgcaacgccacaggccgcacgcccggtccgcgctcggaccgggtggcggcgggtgacgtcctgcactgcccgctgaaccaacgcgaggatctcctcgttctcctgtgcgatggacacgtcctgggccgcggtcgtgtcgccgccgggggccgtcagctgctcctccggggagatgggggggtcggacgccccgacgatgggcgggtctgcgggcgcccccgcgtggggccgggccaagggctgcggacgcggggacgcgctttcccccagacccatggacaggtgggccgcagcctccttcgcggccggcggggcggcggcgccaagcagagcgacgtagcggcacaaatgccgacagacgcgcatgatgcgcgtgctgtcggccgcgtagcgcgtgttgggggggacgagctcgtcgtaactaaacagaatcacgcgggcacagctcgcccccgagccccacgcaaggcgcagcgccgccacggcgtacgggtcatagacgccctgcgcgtcacacaccacgggcagggagacgaacaaccccccggcgctggacgcacgcggaaggaggccagggtgtgccggcacgacgggggccagaagctcccccaccgcatccgcgggcacgtaggcggcaaacgccgtgcaccacggggtacagtcgccggtggcatgagcccgagtctggatttcgacctggaagtttgcggccgtcccgagtccggggcggccgcgcatcagggcggccagagggattcccgcggccgccaggcactcgctggatatgatgacgtgaaccaaagacgagggccgacccgggccgtggccgagatcgtactggacctcgttggccaagtgcgcgttcatggttcgggggtgggtgtgggtgtgtaggcgatgcgggtcccccgagtccgcgggaagggcgtgggtttggcgcgcgtatgcgtattcgccaacggaggcgtgcgtgcttatgcgcggcgcgtttcttctgtctctagggaatccgaggccaggactttaacctgctctttgtcgacgaggccaactttattcgcccggatgcggtccagacgattatgggctttctcaaccaggccaactgcaagattatcttcgtgtcgtccaccaacaccgggaaggccagtacgagctttttgtacaacctccgcggggccgcagacgagcttctcaacgtggtgacctatatatgcgatgatcacatgccgagggtggtgacgcacacaaacgccacggcctgttcttgttatatcctcaacaagcccgttttcatcacgatggacggggcggttcgccggaccgccgatttgtttctggccgattccttcatgcaggagatcatcgggggccaggccagggagaccggcgacgaccggcccgttctgaccaagtctgcgggggagcggtttctgttgtaccgcccctcgaccaccaccaacagcggcctcatggcccccgatttgtacgtgtacgtggatcccgcgttcacggccaacacccgagcctccgggaccggcgtcgctgtcgtcgggcggtaccgcgacgattatatcatcttcgccctggagcacttttttctccgcgcgctcacgggctcggcccccgccgacatcgcccgctgcgtcgtccacagtctgacgcaggtcctggccctgcatcccggggcgtttcgcggcgtccgggtggcggtcgagggaaatagcagccaggactcggccgtcgccatcgccacgcacgtgcacacagagatgcaccgcctactggcctcggagggggccgacgcgggctcgggccccgagcttctcttctaccactgcgagcctcccgggagcgcggtgctgtacccctttttcctgctcaacaaacagaagacgcccgcctttgaacactttattaaaaagtttaactccgggggcgtcatggcctcccaggagatcgtttccgcgacggtgcgcctgcagaccgacccggtcgagtatctgctcgagcagctaaataacctcaccgaaaccgtctcccccaacactgacgtccgtacgtattccggaaaacggaacggcgcctcggatgaccttatggtcgccgtcattatggccatctacctcgcggcccaggccggacctccgcacacattcgctcctatcacacgcgtctcgtgagcgcccaataaacacacccaggtatgctacgcacgaccacggtgtcgtctgttaaggggggggggggaagggggtgttggcgggaagcgtgggaacacgggggattctctcacgaccggcaccagtaccacccccctgtgaacacagaaaccccaacccaaatcccataaacatacgacacacaggcatattttggaatttcttaggtttttatttatttaggtatgctggggtttctccctggatgcccacccccacccccccgtgggtctagccgggccttagggatagcgtataacgggggccatgtctccggaccgcacaacggccgcgccgtcaaaggtgcacacccgaaccacgggagccagggccaaggtgtctcctagttggcccgcgtgggtcagccaggcgacgagcgcctcgtaaagcggcagccttcgctctccatcctgcatcagggccggggcttcggggtgaatgagctgggcggcctcccgcgtgacactctgcatctgcagtagagcgttcacgtacccgtcctgggcacttagcgcaaagagccgggggattagcgtaaggatgatggtggttccctccgtgatcgagtaaaccatgttaaggaccagcgatcgcagctcggcgtttacgggaccgagttgttggacgtccgccagcagcgagaggcgactcccgttgtagtacagcacgttgaggtctggcagccctccggggtttctggggctggggttcaggtcccggatgcccctggccacgagccgcgccacgatttcgcgcgccaggggcgatggaagcggaacgggaaaccgcaacgtgaggtccagcgaatccaggcgcacgtccgtcgcttggccctcgaacacgggcgggacgaggctgatggggtccccgttacagagatctacgggggaggtgttgcgaaggttaacggtgccggcgtgggtgaggcccacgtccagggggcaggcgacgattcgcgtgggaagcacccgggtgatgaccgcggggaagcgccttcggtacgccagcaacaaccccaacgtgtcgggactgacgcctccggagacgaaggattcgtgcgccacgtcggccagcgtcagttgccggcggatggtcggcaggaataccacccgcccttcgcagcgctgcagcgccgccgcatcggggcgcgagatgcccgagggtatcgcgatgtcagtttcaaagccgtccgccagcatggcgccgatccacgcggcagggagtgcagtggtggttcgggtggcgggaggagcgcggtgggggtcagcggcgtagcagagacgggcgaccaacctcgcataggacggggggtgggtcttagggggttgggaggcgacagggaccccagagcatgcgcggggaggtctgtcgggcccagacgcaccgagagcgaatccgtccgcggagtcccggcttgggttttatggggcccggccctcggaatcgcggcttgtcggcggggacaaagggggcggggctaggggcttgcggaaacagaagacgcgtgggataaaagaatcgcactaccccaaggaagggcggggcggtttattacagagccagtcccttgagcggggatgcgtcatagacgagatactgcgcgaagtgggtctcccgcgcgtgggcttccccgttgcgggcactgcggaggagggcggggtcgctggcgcaggtgagcgggtaggcctcctgaaacaggccacacgggtcctccacgagttcgcggcaccccggggggcgcttaaactgtacgtcgctggcggcggtggccgtggacaccgccgaacccgtctccacgatcaggcgctccaggcagcgatgtttggcggcgatgtcggccgacgtaaagaacttaaagcaggggctgagcaccggcgaggccccgttgaggtggtaggccccgttatagagcaggtccccgtacgaaaatcgctgcgacgcccacgggttggccgtggccgcgaaggcccgggacgggtcgctctggccgtggtcgtacatgagggcggtgacatccccctccttgtcccccgcgtaaacgcccccggcggcgcgtccccgggggttgcagggccggcggaagtagttgacgtcggtcgacacgggggtggcgataaactcacacacggcgtcctggccgtggtccatccctgcgcgccgcggcacctgggcgcacccgaacacggggacgggctgggccggccccaggcggtttcccgccacgaccgcgttccgcaggtacacggctgccgcgttgtccaggagagggggagccccgcggcccaggtaaaagttttggggaaggttgcccatgtcggtgacggggttgcggacggttgccgtggccacgacggcggtgtagcccacgcccaggtccacgttcccgcgcggctgggtgagcgtgaagtttacccccccgccagtttcgtgccgggccacctggagctggcccaggaagtacgcctccgacgcgcgctccgagaacagcacgttctcagtcacaaagcggtcctgtcggacgacggtgaacccaaacccgggatggaggcccgtcttgagctgatgatgcaaggccacgggactgatcttgaagtaccccgccatgagcgcgtaggtcagcgcgttctccccggccgcgctctcgcggacgtgctgcacgacgggctgtcggatcgacgaaaagtagttggcccccagagccggggggaccagggggacctgccgcgacaggtcgcgcagggccggggggaaattgggcgcgttcgccacgtggtcggccccggcgaacagcgcgtggacggggagggggtaaaaatagtcgccattttggatggtatggtccagatgctggggggccatcagcaggattccggcgtgcaacgccccgtcgaatatgcgcatgttggtggtggacgcggtgttggcgcccgcgtcgggcgccgccgagcagagcagcgccgttgtgcgttcggccatgttgtgggccagcacctgcagcgtgagcatggcgggcccgtccactaccacgcgcccgttgtgaaacatggcgttgaccgtgttggccaccagattggccgggtgcagggggtgcgcggggtccgtcacggggtcgctggggcactcctcgccgggggcgatctccgggaccaccatgttctgcagggtggcgtatacgcggtcgaagcgaacccccgcggtgcagcagcggccccgcgagaaggcgggcaccatcacgtagtagtaaatcttgtggtgcacggtccagtccgccccccggtgcggccggtcatccgcggcgtccgcggctcgggcctgggtgttgtgcagcagctggccgtcgttgcggttgaagtccgcggtcgccacgttacatgccgccgcgtacacggggtcgtggccccccgcgctaacccggcagtcgcgatggcggtccagggccgcgcgccgcatcagggcgtcacagtcccacacgaggggtggcagcagcgccgggtctcgcattaggtgattcagctcggcttgcgcctgcccgcccagctccgggccggtcagggtaaagtcatcaaccagctgggccagggcctcgacgtgcgccaccaggtcccggtacacggccatgcactcctcgggaaggtctcccccgaggtaggtcacgacgtacgagaccagcgagtagtcgttcacgaacgccgcgcaccgcgtgttgttccagtagctggtgatgcactggaccacgagccgggccagggcgcagaagacgtgctcgctgccgtgtatggcggcctgcagcaggtaaaacaccgccgggtagttgcggtcgtcgaacgccccgcgaacggcggcgatggtggcgggggccatggcgtggcgtcccacccccagctccaggccccgggcgtcccggaacgccgccggacatagcgccaggggcaagttgccgttcaccacgcgccaggtggcctggatctcccccgggccggccgggggaacgtccccccccggcagctccacgtcggccacccccacaaagaagtcgaacgcggggtgcagctcaagagccaggttggcgttgtcgggctgcataaactgctccggggtcatctggccttccgcgacccatcggacccgcccgtgggccaggcgctgcccccaggcgttcaaaaacagctgctgcatgtctgcggcggggccggccggggccgccacgtacgccccgtacggattggcggcttcgacggggtcgcggttaaggcccccgaccgccgcgtcaacgttcatcagcgaagggtggcacacggtcccgatcgcgtgttccagagacaggcgcagcacctggcggtccttcccccaaaaaaacagctggcggggcgggaaggcgcggggatccgggtggccgggggcggggactaggtccccggcgtgcgcggcaaaccgttccatgaccggattgaacaggcccaggggcaggacgaacgtcaggtccatggcgcccaccagggggtagggaacgttggtggcggcgtagatgcgcttctccagggcctccagaaagaccagcttctcgccgatggacaccagatccgcgcgcacgcgcgtcgtctggggggcgctctcgagctcgtccagcgtctgccggttcaggtcgagctgctcctcctgcatctccagcaggtggcggcccacgtcgtccagacttcgcacggccttgcccatcacgagcgccgtgaccaggttggccccgttcaggaccatctcgccgtacgtcaccggcacgtcggcttcggtgtcctccactttcaggaaggactgcaggaggcgctgtttgatcggggcggtggtgacgagcaccccgtcgaccggccgcccgcgcgtgtcggcatgcgtcagacggggcacggccacggagggctgcgtggccgtggtgaggtccacgagccaggcctcgacggcctcccggcggtggcccgccttgcccaggaaaaagctcgtctcgcagaagcttcgctttagctcggcgaccagggtcgcccgggccaccctggtggccaggcggccgttgtccaggtatcgttgcatcggcaacaacaaagccaggggcggcgccttttccagcagcacgtgcagcatctggtcggccgtgccgcgctcaaacgccccgaggacggcctggacgttgcgagcgagctgttggatggcgcgcaactggcgatgcgcgccgatacccgtcccgtccagggcctcccccgtgagcagggcgatggcctcggtggccaggctgaaggcggcgttcagggcccggcggtcgataatcttggtcatgtaattgtgtgtgggttgctcgatggggtgcgggccgtcgcgggcaatcagcggctggtggacctcgaactgtacgcgcccctcgttcatgtaggccagctccggaaacttggtacacacgcacgccaccgacaacccgagctccagaaagcgcacgagcgacagggtgttgcaatacgaccccagcagggcgtcgaactcgacgtcgtacaggctgtttgcatcggagcgcacgcgggaaaaaaaatcaaacaggcgtcgatgcgacgccacctcgatcgtgctaaggagggacccggtcggcaccatggccgcggcataccggtatcccggagggtcgcggttgggagcggccatggggtcgcgtggagatcggctgtctctagcgatattggcccggggaggctaagatccaccccaacgcccggccacccgtgtacgtgcccgacggcccaaggtccaccgaaagacacgacgggcccggacccaaaaaggcgggggatgctgtgtgagaggccgggtgccggtcgggggggaaaggcaccgggagaaggctgcggcctcgttccaggagaacccagtgtccccaacagacccggggacgtgggatcccaggccttatatacccccccccccgccccacccccgttagaacgcgacgggtgcattcaagatggccctggtccaaaagcgtgccaggaagaaattggcagaggcggcaaagctgtccgccgccgccacccacatcgaggccccggccgcgcaggctatccccagggcccgtgtgcgcaggggatcggtgggcggcagcatttggttggtggcgataaagtggaaaagcccgtccggactgaaggtctcgtgggcggcggcgaacaaggcacacagggccgtgcctcccaaaaacacggacatcccccaaaacacgggcgccgacaacggcagacgatccctcttgatgttaacgtacaggaggagcgcccgcaccgcccacgtaacgtagtagccgacgatggcggccaggatacaggccggcgccaccacccttccggtcagcccgtaatacatgcccgctgccaccatctccaacggcttcaggaccaaaaacgaccaaaggaacagaatcacgcgctttgaaaagaccggctgggtatggggcggaagacgcgagtatgccgaactgacaaaaaaatcagaggtgccgtacgaggacaatgaaaactgttcctccagcggcagttctccctcctcccccccgaaggcggcctcgtcgaccagatctcgatccaccagaggaaggtcatcccgcatggtcatggggtgtgcggtggaggtggggagaccgaaaccgcaaagggtcgcttacgtcagcaggatcccgagatcaaagacacccgggttcttgcacaaacaccacccgggttgcatccgcggaggcgagtgttttgataaggccgttccgcgccttgatataacctttgatgttgaccacaaaacccggaatttacgcctacgccccaatgcccacgcaagatgaggtaggtaacccccccgtgggtgtgacgttgcgtttagttcattggaggccaaggggaaaaatggggtggggaggaaacggaaaacccagtaggccgtgtcgggaacacgcccggggttgtcctcaaaaggcagggtccatactacggaagccgtcgttgtattcgagacctgcctgtgcaacgcacgtcggggttgcctgtgtccggttcggcccccaccgcgtgcggcacgcacgaggacgagtccgcgtgctttattggcgttccaagcgttgccctccagtttctgttgtcggtgttcccccatacccacgcccacatccaccgtagggggcctctgggccgtgttacgtcgccgcccgcgatggagcttagctacgccaccaccatgcactaccgggacgttgtgttttacgtcacaacggaccgaaaccgggcctactttgtgtgcggggggtgtgtttattccgtggggcggccgtgtgcctcgcagcccggggagattgccaagtttggtctggtcgttcgagggacaggcccagacgaccgcgtggtcgccaactatgtacgaagcgagctccgacaacgcggcctgcaggacgtgcgtcccattggggaggacgaggtgtttctggacagcgtgtgtcttctaaacccgaacgtgagctccgagctggatgtgattaacacgaacgacgtggaagtgctggacgaatgtctggccgagtactgcacctcgctgcgaaccagcccgggtgtgctaatatccgggctgcgcgtgcgggcgcaggacagaatcatcgagttgtttgaacacccaacgatagtcaacgtttcctcgcactttgtgtataccccgtccccatacgtgttcgccctggcccaggcgcacctcccccggctcccgagctcgctggaggccctggtgagcggcctgtttgacggcatccccgccccacgccagccacttgacgcccacaacccgcgcacggatgtggttatcacgggccgccgcgccccacgacccatcgccgggtcgggggcggggtcggggggcgcgggcgccaagcgggccaccgtcagcgagttcgtgcaagtcaaacacattgaccgcgtgggccccgctggcgtttcgccggcgcctccgccaaacaacaccgactcgagttccctggtgcccggggcccaggattccgccccgcccggccccacgctaagggagctgtggtgggtgttttatgccgcagaccgggcgctggaggagccccgcgccgactctggcctcacccgcgaggaggtacgtgccgtacgtgggttccgggagcaggcgtggaaactgtttggctccgcgggggccccgcgggcgtttatcggggccgcgttgggcctgagccccctccaaaagctagccgtttactactatatcatccaccgagagaggcgcctgtcccccttccccgcgctagtccggctcgtaggccggtacacacagcgccacggcctgtacgtccctcggcccgacgacccagtcttggccgatgccatcaacgggctgtttcgcgacgcgctggcggccggaaccacagccgagcagctcctcatgttcgaccttctccccccaaaggacgtgccggtgggaagcgacgtgcaggccgacagcaccgctctgctgcgctttatagaatcgcaacgtctcgccgtccccgggggggtgatctcccccgagcacgtcgcgtaccttggtgcgttcctgagcgtgctgtacgctggccgcgggcgcatgtccgcagccacgcacaccgcgcggctgacaggggtgacctccctggtgctagcggtgggtgacgtggaccgtctttccgcgtttgaccgcggagcggcgggcgcggccagccgcacgcgggccgccgggtacctggatgtgcttcttaccgttcgtctcgctcgctcccaacacggacagtctgtgtaaaagaccccaataaacgtatatcgctactacacccttgtgtgtcaatggacgcctctccgggggggggggagggaaagcaaagaggggctgggggagcggcaccaccggggcctgaacaaacaaaccacagacacggttacagtttattcggtcgggcggagaaacggccgaagccacgcccactttattcgcgtctccaaaaaaacgggacacttgtccggagaacctttaggatgccagccagggcggcggtaatcataaccacgcccagcgcagaggcggccagaaacccgggcgcaattgcggccacgggctgcgtgtcaaaggctagcaaatgaatgacggttccgtttggaaatagcaacaaggccgtggacggcacgtcgctcgaaaacacgcttggggcgccctccgtcggcccggcggcgatttgctgctgtgtgttgtccgtatccaccagcaacacagacatgacctccccggccggggtgtagcgcataaacacggcccccacgagccccaggtcgcgctggttttgggtgcgcaccagccgcttggactcgatatcccgggtggagccttcgcatgtcgcggtgaggtaggttaggaacagtgggcgtcggacgtcgacgccggtgagcttgtagccgatcccccggggcagaggggagtgggtgacgacgtagctggcgttgtgggtgatgggtaccaggatccgtggctcgacgttggcagactgccccccgcaccgatgtgaggcctcagggacgaaggcgcggatcagggcgttgtagtgtgcccaacgcgtcagggtcgaggcgaggccgtgggtctgctgggccaggacttcgaccggggtctcggatcgggtggcttgagccagcgcgtccaggataaacacgctctcgtctagatcaaagcgcagggaggccgcgcatggcgaaaagtggtccggaagccaaaagagggttttctggtggtcggcccgggccagcgcggtccggaggtcggcgttggtcgctgcggcgacgtcggacgtacacagggccgaggctatcagaaggctccggcgggcgcgttcccgctgcaccgccgaggggacgccagccaagaacggctgccggaggacagccgaggcgtaaaatagcgcccggtggacgaccggggtggtcagcacgcggccccctagaaactcggcatacagggcgtcgatgagatgggctgcgctgggcgccactgcgtcgtacgccgaggggctatccagcacgaaggccagctgatagcccagcgcgtgtaatgccaagctctgttcgcgctccagaatctcggccaccaggtgctggagccgagcctctagctgcaggcgggccgtgggatccaagactgacacattaaaaaacacagaatccgcggcacagcccgcggccccgcgggcggccaacccggcaagcgcgcgcgagtgggccaaaaagcctagcaggtcggagaggcagaccgcgccgtttgcgtgggcggcgttcacgaaagcaaaacccgacgtcgcgagcagccccgttaggcgccagaagagaggggggcgcgggccctgctcggcgcccgcgtcccccgagaaaaactccgcgtatgcccgcgacaggaactgggcgtagttcgtgccctcctccgggtagccgcccacgcggcggagggcgtccagcgcggagccgttgtcggcccgcgtcagggaccctaggacaaagacccgataccgggggccgcccgggggcccgggaagagcccccggggggttttcgtccgcggggtccccgacccgatctagcgtctggcccgcggggaccaccatcacttccaccggagggctgtcgtgcatggatatcacgagccccatgaattcccgcccgtagcgcgcgcgcaccagcgcggcatcgcacccgagcaccagctcccccgtcgtccagatgcccacgggccacgtcgaggccgacggggagaaatacacgtacctacctggggatctcaacaggccccgggtggccaaccaggtcgtggacgcgttgtgcaggtgcgtgatgtccagctccgtcgtcgggtgccgccgggccccaaccggcggtcgggggggcggtgtatcacgcggcccgctcgggtggctcgccgtcgccacgttgtctccccgcgggaacgtcagggcctcggggtcagggacggccgaaaacgttacccaggcccgggaacgcagcaacacggaggcggctggattgtgcaagagacccttaaggggggcgaccgaggggggaggctgggcggtcggctcgaccgtggtgggggcgggcaggctcgcgttcgggggccggccgagcaggtaggtcttcgggatgtaaagcagctggccggggtcccgcggaaactcggccgtggtgaccaatacaaaacaaaagcgctcctcgtaccagcgaagaaggggcagagatgccgtagtcaggtttagttcgtccggcggcgccagaaatccgcgcggtggtttttgggggtcgggggtgtttggcagccacagacgcccggtgttcgtgtcgcgccagtacatgcggtccatgcccaggccatccaaaaaccatgggtctgtctgctcagtccagtcgtggacctgaccccacgcaacgcccaaaataataacccccacgaaccataaaccattccccatgggggaccccgtccctaacccacggggcccgtggctatggcagggcttgccgccccgacgttggctgcgagccctgggccttcacccgaacttgggggttggggtggggaaaaggaagaaacgcgggcgtattggtcccaatggggtctcggtggggtatcgacagagtgccagccctgggaccgaaccccgcgtttatgaacaaacgacccaacacccgtgcgttttattctgtctttttattgccgtcatagcgcgggttccttccggtattgtctccttccgtgtttcagttagcctcccccatctcccgggcaaacgtgcgcgccaggtcgcagatcgtcggtatggagcctggggtggtgacgtgggtctggaccatcccggaggtaagttgcagcagggcgtcccggcagccggcgggcgattggtcgtaatccaggataaagacgtgcatgggacggaggcgtttggccaagacgtccaaagcccaggcaaacacgttatacaggtcgccgttgggggccagcaactcgggggcccgaaacagggtaaataacgtgtccccgatatggggtcgtgggcccgcgttgctctggggctcggcaccctggggcggcacggccgcccccgaaagctgtccccaatcctcccgccacgacccgccgccctgcagataccgcaccgtattggcaagcagcccataaacgcggcgaatcgcggccagcatagccaggtcaagccgctcgccggggcgctggcgtttggccaggcggtcgatgtgtctgtcctccggaagggcccccaacacgatgtttgtgccgggcaaggtcggcgggatgagggccacgaacgccagcacggcctggggggtcatgctgcccataaggtatcgcgcggccgggtagcacaggagggcggcgatgggatggcggtcgaagatgagggtgagggccgggggcggggcatgtgagctcccagcctcccccccgatatgaggagccagaacggcgtcggtcacggcataaggcatgcccattgttatctgggcgcttgtcattaccaccgccgcgtccccggccgatatctcaccctggtcgaggcggtgttgtgtggtgtagatgttcgcgattgtctcggaagcccccaacacccgccagtaagtcatcggctcgggtacgtagacgatatcgtcgcgcgaacccagggccaccagcagttgcgtggtggtggttttccccatcccgtggggaccgtctatataaacccgcagtagcgtgggcattttctgctccaggcggacttccgtggctttttgctgccggcgagggcgcaacgccgtacgtcggttgttatggccgcgagaacgcgcagcctggtcgaacgcagacgcgtgttgatggcaggggtacgaagccatacgcgcttctacaaggcgctggccgaagaggtgcgggagtttcacgccaccaagatctgcggcacgctgttgacgctgttaagcgggtcgctgcagggtcgctcggtattcgaggccacacgcgtcaccttaatatgcgaagtggacctgggaccgcgccgccccgactgcatctgcgtgttcgaattcgccaatgacaagacgctgggcggggtttgtgtcatcatagaactaaagacatgcaaatatatttcttccggggacaccgccagcaaacgcgagcaacgggccacggggatgaagcagctgcgccactccctgaagctcctgcagtccctcgcgcctccgggtgacaagatagtgtacctgtgccccgtcctggtgtttgtcgcccaacggacgctccgcgtcagccgcgtgacccggctcgtcccgcagaaggtctccggtaatatcaccgcagtcgtgcggatgctccagagcctgtccacgtatacggtccccattgagcctaggacccagcgagcccgtcgccgccgcggcggcgccgcccgggggtctgcgagcagaccgaaaaggtcacactctggggcgcgcgacccgcccgagtcagcggcccgccagttaccacccgccgaccaaacccccgcctccacggagggcgggggggtgcttaagaggatcgcggcgctcttctgcgtgcccgtggccaccaagaccaaaccccgagccgcctccgaatgagagtgtttcgttccttccccctccccccgcgtcagacaaaccctaaccaccgcttaagcggcccccgcgaggtccgaagactcatttggatccggcgggagccacccgacaacagcccccgggttttcccacgccagacgccggtccgctgtgccatcgcgccccctcatcccaccccccatcttgtccccaaataaaacaaggtctggtagttaggacaacgaccgcagttctcgtgtgttattttcgctctccgcctctcgcagatggacccgtactgcccatttgacgctctggacgtctgggaacacaggcgcttcatagtcgccgattcccgaaacttcatcacccccgagttcccccgggacttttggatgtcgcccgtctttaacctcccccgggagacggcggcggagcaggtggtcgtcctacaggcccagcgcacagcggctgccgctgccctggagaacgccgccatgcaggcggccgagctccccgtcgatatcgagcgccggttacgcccgatcgaacggaacgtgcacgagatcgcaggcgccctggaggcgctggagacggcggcggccgccgccgaagaggcggatgccgcgcgcggggatgagccggcgggtgggggcgacgggggggcgcccccgggtctggccgtcgcggagatggaggtccagatcgtgcgcaacgacccgccgctacgatacgacaccaacctccccgtggatctgctacacatggtgtacgcgggccgcggggcgaccggctcgtcgggggtggtgttcgggacctggtaccgcactatccaggaccgcaccatcacggactttcccctgaccacccgcagtgccgactttcgggacggccgtatgtccaagaccttcatgacggcgctggtactgtccctgcaggcgtgcggccggctgtatgtgggccagcgccactattccgccttcgagtgcgccgtgttgtgtctctacctgctgtaccgaaacacgcacggggccgccgacgatagcgaccgcgctccggtcacgttcggggatctgctgggccggctgccccgctacctggcgtgcctggccgcggtgatcgggaccgagggcggccggccacagtaccgctaccgcgacgacaagctccccaagacgcagttcgcggccggcgggggccgctacgaacacggagcgctggcgtcgcacatcgtgatcgccacgctgatgcaccacggggtgctcccggcggccccgggggacgtcccccgggacgcgagtacccacgttaaccccgacggcgtggcgcaccacgacgacataaaccgcgccgccgccgcgttcctcagccggggccacaacctattcctgtgggaggaccagactctgctgcgggcaaccgcgaacaccataacggccctgggcgttatccagcggctcctcgcgaacggcaacgtgtacgcggaccgcctcaacaaccgcctgcagctgggcatgctgatccccggagccgtcccttcggaggccatcgcccgtggggcctccgggtccgactcgggggccatcaagagcggagacaacaatctggaggcgctatgtgccaattacgtgcttccgctgtaccgggccgacccggcggtcgagctgacccagctgtttcccggcctggccgccctgtgtcttgacgcccaggcggggcggccggtcgggtcgacgcggcgggtggtggatatgtcatcgggggcccgccaggcggcgctggtgcgcctcaccgccctggaactcatcaaccgcacccgcacaaaccccacccctgtgggggaggttatccacgcccacgacgccctggcgatccaatacgaacaggggcttggcctgctggcgcagcaggcacgcattggcttgggctccaacaccaagcgtttctccgcgttcaacgttagcagcgactacgacatgttgtactttttatgtctggggttcattccacagtacctgtcggcggtttagtgggtggtgggcgaggggggagggggcattagggagaaagaacaagagcctccgttgggttttctttgtgcctgtactcaaaaggtcataccccgtaaacggcgggctccagtcccggcccggcggttggcgtgaacgcaacggcgggagctgggttagcgtttagtttagcattcgctctcgcctttccgcccgccccccgaccgttgcgcctttttttttttcgtccaccaaagtctctgtgggtgcgcgcatggcagccgatgccccgggagaccggatggaggagcccctgcccgacagggccgtgcccatttacgtggctgggtttttggccctgtatgacagcggggactcgggcgagttggcattggatccggatacggtgcgggcggccctgcctccggataacccactcccgattaacgtggaccaccgcgctggctgcgaggtggggcgggtgctggccgtggtcgacgacccccgcgggccgttttttgtggggctgatcgcctgcgtgcagctggagcgcgtcctcgagacggccgccagcgctgcgattttcgagcgccgcgggccgccgctctcccgggaggagcgcctgttgtacctgatcaccaactacctgccctcggtctccctggccacaaaacgcctggggggcgaggcgcaccccgatcgcacgctgttcgcgcacgtcgcgctgtgcgcgatcgggcggcgcctcggcactatcgtcacctacgacaccggtctcgacgccgccatcgcgccctttcgccacctgtcgccggcgtctcgcgagggggcgcggcgactggccgccgaggccgagctcgcgctgtccgggcgcacctgggcgcccggcgtggaggcgctgacccacacgctgctttccaccgccgttaacaacatgatgctgcgggaccgctggagcctggtggccgagcggcggcggcaggccgggatcgccggacacacctacctccaggcgagcgaaaaattcaaaatgtggggggcggagcctgtttccgcgccggcgcgcgggtataagaacggggccccggagtccacggacataccgcccggctcgatcgctgccgcgccgcagggtgaccggtgcccaatcgtccgtcagcgcggggtcgccttgtccccggtactgccccccatgaaccccgttccgacatcgggcaccccggcccccgcgccgcccggcgacgggagctacctgtggatcccggcctcccattacaaccagctcgtcgccggccatgccgcgccccaaccccagccgcattccgcgtttggtttcccggctgcggcggggtccgtggcctatgggcctcacggtgcgggtctttcccagcattaccctccccacgtcgcccatcagtatcccggggtgctgttctcgggacccagcccactcgaggcgcagatagccgcgttggtgggggccatagccgcggaccgccaggcgggcggtcagccggccgcgggagaccctggggtccgggggtcgggaaagcgtcgccggtacgaggcggggccgtcggagtcctactgcgaccaggacgaaccggacgcggactacccgtactaccccggggaggctcgaggcgggccgcgcggggtcgactcccggcgcgcggcccgccattctcccgggaccaacgagaccatcacggcgctgatgggggcggtgacgtctctgcagcaggaactggcgcacatgcgggctcggaccagcgccccctatggaatgtacacgccggtggcgcactatcgccctcaggtgggggagccggaaccaacaacgacccacccggccctttgtcccccggaggccgtgtatcgccccccaccacacagcgccccctacggtcctccccagggtccggcgtcccatgcccccactcccccgtatgccccagctgcctgcccgccaggcccgccaccgcccccatgtccttccacccagacgcgcgcccctctaccgacggagcccgcgttcccccccgccgccaccggatcccaaccggaggcatccaacgcggaggccggggcccttgtcaacgccagcagcgcagcacacgtggacgttgacacggcccgcgccgccgatttgttcgtctctcagatgatgggggcccgctgattcgccccggtctttggtaccatgggatgtcttactgtatatctttttaaataaaccaggtaataccaaataagacccattggtgtatgttctttttttattgggaggcgcgggtaggcgggtagctttacaatgcaaaagccttcgacgtggaggaaggcgtggggggggggggaatcggcactgaccaagggggtccgttttgtcacgggaaaggaaagaggaaacaggccgcggacacccgggggagtttgtgttcccttttctttcttcccacacacacaaaaggcgtaccaaacaaacaaaccaaaagatgcacatgcggtttaacacccgtggtttttatttacaacaaaccccccatcacaggtcgtcctcgtcggcgtcaccgtctttgttgggaacttgggtgtagttggtgttgcggcgcttgcgcatgaccatgtcggtgaccttggcgctgagcagcgcgctcgtgcccttcttcttggccttgtgttccgtgcgctccatggcagacaccagggccatgtaccgtatcatctcccgggcctcggctagcttggcctcgtcaaagtcgccgccctcctcgccctccccggacgcgtccgggttggtggggttcttgagctccttggtggttagcgggtacagggccttcatggggttgctctgcagccgcatgacgtagcgaaaggcgaagaaggccgccgccaggccggccaggaccaacagacccacggccagcgccccaaaggggttggacatgaaggaggacacgcccgacacggccgataccacgccgcccacgatgcccatcaccaccttgccgaccgcgcgccccaggtcgcccatcccctcgaagaacgcgcccaggcccgcaaacatggcggcgttggcgtcggcgtggatgaccgtgtcgatgtcggcgaagcgcaggtcgtgcagctggttgcggcgctggacctccgtgtagtccagcaggccgctgtccttgatctcgtggcgggtgtacacctccagggggacaaactcgtgatcctccagcatggtgatgttgaggtcgatgaaggtgctgacggtggtgatgtcggcgcggctcagctggtgggagtacgcgtactcctcgaagtacacgtagcccccaccgaaggtgaagtagcgccggtgtcccacggtgcacggctcgatcgcatcgcgcgtcagccgcagctcgttgttctcccccagctgcccctcgaccaacgggccctggtcttcgtaccgaaagctgaccagggggcggctgtagcaggccccgggccgcgagctgatgcgcatcgagttttggacgatcacgttgtccgcggcgaccggcacgcacgtggagacggccatcacgtcgccgagcatccgcgcgctcacccgccggcccacggtggccgaggcgatggcgttggggttcagcttgcgggcctcgttccacagggtcagctcgtgattctgcagctcgcaccacgcgatggcaacgcggcccaacatatcgttgacatggcgctgtatgtggttgtacgtaaactgcagcctggcgaactcgatggaggaggtggtcttgatgcgctccacggacgcgttggcgctggccccgggcggcgggggcgtggggtttgggggcttgcggctctgctcgcggaggtgttcccgcacgtacagctccgcgagcgtgttgctgagaaggggctggtacgcgatcagaaagcccccattggccaggtagtactgcggctggcccaccttgatgtgcgtcgcgttgtacctgcgggcgaagatgcggtccatggcgtcgcgggcgtccttgccgatgcagtcccccaggtccacgcgcgagagcgggtactcggtcaggttggtggtgaaggtggtggatatggcgtcggaagagaatcggaaggagccgccgtactcggagcgcagcatctcgtccacctcctgccacttggtcatggtgcagaccgacgggcgctttggcacccagtcccaggccacggtgaacttgggggtcgtgagcaggttccgggtggtcggcgccgtggcccgggccttggtggtgaggtcgcgcgcgtagaagccgtcgacctgcttgaagcggtcggcggcgtagctggtgtgttcggtgtgcgacccctcccggtagccgtaaaacggggacatgtacacaaagtcgccagtcgccaacacaaactcgtcgtacgggtacaccgagcgcgcgtccacctcctcgacgatgcagtttaccgtcgtcccgtaccggtggaacgcctccacccgcgaggggttgtacttgaggtcggtggtgtgccagccccggctcgtgcgggtcgcggcgttggccggtttcagctccatgtcggtctcgtggtcgtcccggtgaaacgcggtggtctccaggttgttgcgcacgtacttggccgtggaccgacagacccccttggcgttgatcttgtcgatcacctcctcgaaggggacgggggcgcggtcctcaaagatccccataaactgggagtagcggtggccgaaccacacctgcgaaacggtgacgtctttgtagtacatggtggccttgaacttgtacggggcgatgttctccttgaagaccaccgcgatgccctccgtgtagttctgaccctcgggccgggtcgggcagcggcgcggctgctcgaactgcaccaccgtggcgcccgtggggggtgggcacacgtaaaagtttgcatcggtgttctccgccttgatgtcccgcaggtgctcgcgcagggtggcgtggcccgcggcgacggtcgcgttgtcgccggcggggcgcggcggctttgggggtttcggttttttgttcttcttcggtttcgggtcccccgttgggggggcgccaggggcgggcggcgccggagtggcagggcccccgttcgccgcctgggtcgcggccgcgaccccaggcgtgccgggggaactcggagccgccgacgccaccaggacccccagcgtcaaccccaagagcgcccatacgacgaaccaccggcgcccccgcgcgggggcgccctggcgcatggcgggactacgggggcccgtcgtgccccccgtcaggtagcctgggggcgaggtgctggaggaccgagtagaggatcgagaaaacgtctcggtcgtagaccacgaccgaccgggggccgatacagccgtcgggggcgctctcgacgatggccaccagcggacagtcggagtcgtacgtgagatatacgccgggcgggtaacggtaacgaccttcggaggtcgggcggctgcagtccgggcggcgcaactcgagctccccgcaccggtagaccgaggcaaagagtgtggtggcgataatcagctcgcgaatatatcgccaggcggcgcgctgagtgggcgttattccggaaatgccgtcaaaacagtaaaacctctgaaattcgctgacggcccaatcagcacccgagccccccgcccccatgatgaaccgggcgagctcctccttcaggtgcggcaggagccccacgttctcgacgctgtaatacagcgcggtgttggggggctgggcgaagctgtgggtggagtgatcaaagaggggcccgttgacgagctcgaagaagcgatgggtgatgctggggagcagggccgggtccacctggtgtcgcaggagagacgctcgcatgaaccggtgcgcgtcgaacacgcccggcgccgagcggttgtcgatgaccgtgcccgcgcccgccgtcagggcgcagaagcgcgcgcgcgccgcaaagccgttggcgaccgcggcgaacgtcgcgggcagcacctcgccgtggacgctgacccgcagcatcttctcgagctccccgcgctgctcgcggacgcagcgccccaggctggccaacgaccgcttcgtcaggcggtccgcgtacagccgccgtcgctcccgcacgtccgcggccgcttgcgtggcgatgtccccccacgtctcgggcccctgccccccgggcccgcggcgacggtcttcgtcctcgcccccgcccccgggagctcccaacccccgtgccccttcctctacggcgacacggtccccgtcgtcgtcggggcccgcgccgcccttgggcgcgtccgccgcgccccccgcccccatgcgcgccagcacgcgacgcagcgcctcctcgtcgcactgttcggggctgacgaggcgccgcaagagcggcgtcgtcaggtggtggtcgtagcacgcgcggatgagcgcctcgatctgatcgtcgggtgacgtggcctgaccgccgattattagggcgtccaccatatccagcgccgccaggtggctcccgaacgcgcgatcgaaatgctccgcccgccgcccgaacagcgccagttccacggccaccgcggcggtctcctgctgcaactcgcgccgcgccagcgcggtcaggttgctggcaaacgcgtccatggtggtctggccggcgcggtcgccggacgcgagccagaatcgcaattcgctgatggcgtacaggccgggcgtggtggcctgaaacacgtcgtgcgcctccagcagggcgtcggcctccttgcggaccgagtcgttctcgggcgacgggtggggctgcccgtcgccccccgcggtccgggccagcgcatggtccaacacggagagcgcccgcgcgcggtcggcgtccgacagcccggcggcgtggggcaggtaccgccgcagctcgttggcgtccagccgcacctgcgcctgctgggtgacgtggttacagatacggtccgccaggcggcgggcgatcgtcgccccctggttcgccgtcacacacagttcctcgaaacagaccgcgcaggggtgggacgggtcgctaagctccggggggacgataaggcccgaccccaccgcccccaccataaactcccgaacgcgctccagcgcggcggtggcgccgcgcgagggggtgatgaggtggcagtagtttagctgctttagaaagttctcgacgtcgtgcaggaaacacagctccatatggacggtcccgccatacgtatccagcctgacccgttggtgatacggacagggtcgggccaggcccatggtctccgtgaaaaacgccgcgacgtctcccgcggtcgcgaacgtctccaggctgcccaggagccgctcgccctcgcgccacgcgtactctagcagcaactccagggtgaccgacagcggggtgagaaaggccccggcctgggcctccaggcccggcctcagacgacgccgcagcgcccgcacctgaagcgcgttcagcttcagttgggggagcttcccccgtccgatgtgggggtcgcaccgccggagcagctctatctgaaacacataggtctgcacctgcccgagcagggctaacaacttttgacgggccacggtgggctcggacaccggggcggccatctcgcggcgccgatctgtaccgcggccggagtatgcggtggaccgaggcggtccgtacgctacccggcgtctggctgagccccggggtccccctcttcggggcggcctcccgcgggcccgccgaccggcaagccgggagtcggcggcgcgtgcgtttctgctctattcccagacaccgcggagaggaatcacggcccgcccagagatatagacacggaacacaaacaagcacggatgtcgtagcaataatttattttacacacattccccgccccgccctaggttcccccaccccccaacccctcacagcatatccaacgtcaggtctccctttttgtcggggggcccctccccaaacgggtcatccccgtggaacgcccgtttgcggccggcaaatgccggtcccggggcccccgggccgccgaacggcgtcgcgttgtcgtcctcgcagccaaaatccccaaagttaaacacctccccggcgttgccgagttggctgactagggcctcggcctcgtgcgccacctccagggccgcgtccgtcgaccactcgccgttgccgcgctccagggcacgcgcggtcagctccatcatctcctcgcttaggtactcgtcctccaggagcgccagccagtcctcgatctgcagctgctgggtgcggggccccaggcttttcacggtcgccacgaacacgctactggcgacggccgccccgccctcggagataatgccccggagctgctcgcacagcgagctttcgtgcgctccgccgccgaggcttgaggccgcgcacacaaacccggcccggggacaggccaggacgaacttgcgggtgcggtcaaaaataaggagcgggcacgcgtttttgccgcccatcaggctggcccagttcccggcctgaaacacacggtcgttgccggccatgccgtagtacttgctgatgctcaaccccaacacgaccatggggcgcgccgccatgacgggccgcagcaggttgcagctggcgaacatggacgtccacgcgcccggatgcgcgtccacggcgtccatcagcgcgcgggccccggcctccaggcccgccccgccctgcgcggaccacgcggccgcagcctgcacgctggggggacggcgggaccccgcgatgatggccgtaagggtgttgatgaagtatgtcgagtgatcgcagtaccgcagaatctggtttgccatgtagtacatcgccagctcgctcacgttgttgggggccaggttaataaagtttatcgcgccgtagtccagggaaaactttttaatgaacgcgatggtctcgatgtcctcgcgcgacaggagccgggcgggaagctggttgcgttggagggccgtccagaaccactgcgggttcggctggttggaccccgggggcttgccgttggggaagatggccgcgtggaactgcttcagcagaaagcccagcggtccgaggaggatgtccacgcgcttgtcgggcttctggtaggcgctctggaggctggcgacccgcgccttggcggcctcggacgcgttggcgctcgcgcccgcgaacaacacgcggctcttgacgcgcagctccttgggaaaccccagggtcacgcgggcaacgtcgccctcgaagctgctctcggcgggggccgtctggccggccgttaggctgggggcgcagatagccgccccctccgagagcgcgaccgtcagcgttttggccgacagaaacccgttgttaaacatgtccatcacgcgccgccgcagcaccggttggaattgattgcgaaagttgcgcccctcgaccgactgcccggcgaacaccccgtggcactgactcagggccaggtcctggtacacggcgaggttggatcgccgcccgagaagctgaagcagggggcacggcccgcacgcgtacgggtccagcgtcagggacatggcgtggttggcctcgcccagaccgtcgcgaaacttgaagttcctcccctccaccaggttgcgcatcagctgctccacctcgcggtccacgacctgcctgacgttgttcaccaccgtatgcagggcctcgcggttggtgatgatggtctccagccgccccatggccgtggggaccgcctggtccacgtactgcagggtctcgagttcggccatgacgcgctcggtcgccgcgcggtacgtctcctgcatgatggtccgggcggtctcggatccgtccgcgcgcttcagggccgagaaggcggcgtagtttcccagcacgtcgcagtcgctgtacatgctgttcatggtcccgaagacgccgatggctccgcgggcggcgctggcgaactttggatggcgcgcccggaggcgcatgagcgtcgtgtgtacgcaggcgtggcgcgtgtcgaaggtgcataggttacagggcacgtcggtctggttggagtccgcgacgtatcgaaacacgtccatctcctggcgcccgacgatcacgccgccgtcgcagcgctccaggtaaaacagcatcttggccagcagcgccggggaaaacccacacagcatggccaggtgctcgccggcaaattcctgggttccgccgacgaggggcgcggtgggccgaccctcgaacccgggcaccacgtgtccctcgcggtccacctgtgggttggccgccacgtgggtcccgggcacgaggaagaagcggtaaaaggagggtttgctgtggtcctttgggtccgccgggccggcgtcgtccacctcggtgagatggagggccgagttggtgctaaataccatggcccccacgagtcccgcggcgcgcgccaggtacgccccgacggcgttggcgcgggccgcggccgtgtcctggccctcgaacagcggccacgcggagatgtcggtgggcggctcgtcaaagacggccatcgacacgatagactcgagggccagggcggcgtctccggccatgacggaggccaggcgctgttcgaacccgcccgccgggcccttgccgccgccgtcgcgcccgccccgcggggtcttaccctggctggcttcgaaggccgtgaacgtaatgtcggcggggagggcggcgccctcgtggttttcgtcaaacgccaggtgggcggccgcgcgggccacggcgtccacgtttcggcatcgcagtgccacggcggcgggtcccacgaccgcctcgaacaggaggcggttgagggggcggttaaaaaacggaagcgggtaggtaaaattctccccgatcgatcggtggttggcgttgaacggctctgcgatgacacggctaaaatccggcatgaacagctgcaacgggtacacgggtatgcggtgcacctccgccccgcctatggttaccttgtccgagcctcccaggtgcagaaaggtgttgttgatgcacacggcctccttgaagccctcggtaacgaccagatacaggagggcgcggtccgggtccaggccgaggcgctcacacagcgcctcccccgtcgtctcgtgtttgaggtcgccgggccggggggtgtagtccgaaaagccaaaatggcggcgtgcccgctcgcaaagtcgcgtcaggttcggggcctgggtgctggggtccaggtgccggccgccgtgaaagacgtacacggacgagctgtagtgcgagggcgtcagtttcagggacaccgcggtacccccgagccccgtcgtgcgagaacccacgaccacggccacgttggcctcaaagccgctctccacggtcaggcccacgaccaggggcgccacggcgacgtcggaatcgccgctgcgtgccgacagtaacgccagaagctcgatgccttcggacggacacgcgcgagcgtacacgtatcccaggggcccgggggggaccttgatggtggttgccgtcttgggctttgtctccatgtccttttgtcaatcggtccgcgaacggaggtaatcccggcacgacgacggacgcccgacaaggtatgtctcccgagcgtcaaaatccgggggggggcggcgacggtcaaggggagggttggagaccggggttggggaatgaatccctccccttcaccgacaaccccccgggtaaccacggggtgccgatgaaccccggcggccggcaacgcggggtccctgcgagaggcacagatgcttacggtcaggtgctccgggtcgggtgcgtctggtatgcggttggtatatgtacactttacctgggggcgtgccggtccgccccagcccctcccacgccccgcgcgtcatcagccggtgggcgtggccgctattataaaaaaagtgagaacgcgaagcgttcgcactttgtcctaataatatatatattattaggacaaagtgcgaacgcttcgcgttctcactttttttataatagcggccacgcccaccggctacgtcactctcctgtcggccgccggcggtccataagcccggccggccgggccgacgcgaataaaccgggccgccggccggggcgccgcgcagcagctcgccgcccggatccgccagacaaacaaggcccttgcacatgccggcccgggcgagcctgggggtccggtaattttgccatcccacccaagcggctttttgggtttttctcttcccccctccccacattcccctctttaggggttcgggtgggaacaaccgcgatgttttccggtggcggcggcccgctgtcccccggaggaaagtcggcggccagggcggcgtccgggttttttgcgcccgccggccctcgcggagccagccggggacccccgccttgtttgaggcaaaacttttacaacccctacctcgccccagtcgggacgcaacagaagccgaccgggccaacccagcgccatacgtactatagcgaatgcgatgaatttcgattcatcgccccgcgggtgctggacgaggatgcccccccggagaagcgcgccggggtgcacgacggtcacctcaagcgcgcccccaaggtgtactgcgggggggacgagcgcgacgtcctccgcgtcgggtcgggcggcttctggccgcggcgctcgcgcctgtggggcggcgtggaccacgccccggcggggttcaaccccaccgtcaccgtctttcacgtgtacgacatcctggagaacgtggagcacgcgtacggcatgcgcgcggcccagttccacgcgcggtttatggacgccatcacaccgacggggaccgtcatcacgctcctgggcctgactccggaaggccaccgggtggccgttcacgtttacggcacgcggcagtacttttacatgaacaaggaggaggtcgacaggcacctacaatgccgcgccccacgagatctctgcgagcgcatggccgcggccctgcgcgagtccccgggcgcgtcgttccgcggcatctccgcggaccacttcgaggcggaggtggtggagcgcaccgacgtgtactactacgagacgcgccccgctctgttttaccgcgtctacgtccgaagcgggcgcgtgctgtcgtacctgtgcgacaacttctgcccggccatcaagaagtacgagggtggggtcgacgccaccacccggttcatcctggacaaccccgggttcgtcaccttcggctggtaccgtctcaaaccgggccggaacaacacgctagcccagccgcgggccccgatggccttcgggacatccagcgacgtcgagtttaactgtacggcggacaacctggccatcgaggggggcatgagcgacctaccggcatacaagctcatgtgcttcgatatcgaatgcaaggcggggggggaggacgagctggcctttccggtggccgggcacccggaggacctggtcatccagatatcctgtctgctctacgacctgtccaccaccgccctggagcacgtcctcctgttttcgctcggttcctgcgacctccccgaatcccacctgaacgagctggcggccaggggcctgcccacgcccgtggttctggaattcgacagcgaattcgagatgctgttggccttcatgacccttgtgaaacagtacggccccgagttcgtgaccgggtacaacatcatcaacttcgactggcccttcttgctggccaagctgacggacatttacaaggtccccctggacgggtacggccgcatgaacggccggggcgtgtttcgcgtgtgggacataggccagagccacttccagaagcgcagcaagataaaggtgaacggcatggtgaacatcgacatgtacgggattataaccgacaagatcaagctctcgagctacaagctcaacgccgtggccgaagccgtcctgaaggacaagaagaaggacctgagctatcgcgacatccccgcctactacgccgccgggcccgcgcaacgcggggtgatcggcgagtactgcatacaggattccctgctggtgggccagctgttttttaagtttttgccccatctggagctctcggccgtcgcgcgcttggcgggtattaacatcacccgcaccatctacgacggccagcagatccgcgtctttacgtgcctgctgcgcctggccgaccagaagggctttattctgccggacacccaggggcgatttaggggcgccgggggggaggcgcccaagcgtccggccgcagcccgggaggacgaggagcggccagaggaggagggggaggacgaggacgaacgcgaggagggcgggggcgagcgggagccggagggcgcgcgggagaccgccggcaggcacgtggggtaccagggggccagggtccttgaccccacttccgggtttcacgtgaaccccgtggtggtgttcgactttgccagcctgtaccccagcatcatccaggcccacaacctgtgcttcagcacgctctccctgagggccgacgcagtggcgcacctggaggcgggcaaggactacctggagatcgaggtgggggggcgacggctgttcttcgtcaaggctcacgtgcgagagagcctcctcagcatcctcctgcgggactggctcgccatgcgaaagcagatccgctcgcggattccccagagcagccccgaggaggccgtgctcctggacaagcagcaggccgccatcaaggtcgtgtgtaactcggtgtacgggttcacgggagtgcagcacggactcctgccgtgcctgcacgttgccgcgacggtgacgaccatcggccgcgagatgctgctcgcgacccgcgagtacgtccacgcgcgctgggcggccttcgaacagctcctggccgatttcccggaggcggccgacatgcgcgcccccgggccctattccatgcgcatcatctacggggacacggactccatctttgtgctgtgccgcggcctcacggccgccgggctgacggccgtgggcgacaagatggcgagccacatctcgcgcgcgctgtttctgccccccatcaaactcgagtgcgaaaagacgttcaccaagctgctgctgatcgccaagaaaaagtacatcggcgtcatctacgggggtaagatgctcatcaagggcgtggatctggtgcgcaaaaacaactgcgcgtttatcaaccgcacctccagggccctggtcgacctgctgttttacgacgataccgtctccggagcggccgccgcgttagccgagcgccccgcggaggagtggctggcgcgacccctgcccgagggactgcaggcgttcggggccgtcctcgtagacgcccatcggcgcatcaccgacccggagagggacatccaggactttgtcctcaccgccgaactgagcagacacccgcgcgcgtacaccaacaagcgcctggcccacctgacggtgtattacaagctcatggcccgccgcgcgcaggtcccgtccatcaaggaccggatcccgtacgtgatcgtggcccagacccgcgaggtagaggagacggtcgcgcggctggccgccctccgcgagctagacgccgccgccccaggggacgagcccgccccccccgcggccctgccctccccggccaagcgcccccgggagacgccgtcgcctgccgaccccccgggaggcgcgtccaagccccgcaagctgctggtgtccgagctggccgaggatcccgcatacgccattgcccacggcgtcgccctgaacacggactattacttctcccacctgttgggggcggcgtgcgtgacattcaaggccctgtttgggaataacgccaagatcaccgagagtctgttaaaaaggtttattcccgaagtgtggcaccccccggacgacgtggccgcgcggctccggaccgcagggttcggggcggtgggtgccggcgctacggcggaggaaactcgtcgaatgttgcatagagcctttgatactctagcatgagccccccgtcgaagctgatgtccctcattttacaataaatgtctgcggccgacacggtcggaatctccgcgtccgtgggtttctctgcgttgcgccggaccacgagcacaaacgtgctctgccacacgtgggcgacgaaccggtaccccgggcacgcggtgagcatccggtctatgagccggtagtgcaggtgggcggacgtgccgggaaagatgacgtacagcatgtggcccccgtaagtggggtccgggtaaaacaacagccgcgggtcgcacgccccgcctccgcgcaggatcgtgtggacgaaaaaaagctcgggttggccaagaatcccggccaagaggtcctggaggggggcgttgtggcggtcggccaacacgaccaaggaggccaggaaggcgcgatgctcgaatatcgtgttgatctgctgcacgaaggccaggattagggcctcgcggctggtggcggcgaaccgcccgtctcccgcgttgcacgcgggacagcaacccccgatgcctaggtagtagcccatcccggagagggtcaggcagttgtcggccacggtctggtccagacagaagggcagcgagacgggagtggtcttcaccaggggcaccgagagcgagcgcacgatggcgatctcctcggagggcgtctgggcgagggcggcgaaaaggccccgatagcgctggcgctcgtgtaaacacagctcctgtttgcgggcgtgaggcggcaggctcttccgggaggcccgacgcaccacgcccagagtcccgccggccgcagaggagcgcgaccgccggcgctccttgccgtgatagggcccgggccgggagccgcggcgatgggggtcggtgtcatacataggtacacagggtgtgctccagggacaggagcgagatcgagtggcgtctaagcagcgcgcccgcctcacggacaaatgtggcgagcgcggtgggctttggtacaaatacctgatacgtcttgaaggtgtagatgagggcacgcaacgctatgcagacacgcccctcgaactcgttcccgcaggccagcttggccttgtggagcagcagctcgtcgggatgggtggcggggggatggccgaacagaacccaggggtcaacctccatctccgtaatggcgcacatggggtcacagaacatgtgcttaaagatggcctcgggccccgcggcccgaagcaggctcacaaaccggcccccgtccccgggctgcgtctcggggtcagcctcgagctggtcgacgacgggtacgatacagtcgaagaggctcgtgttgttttccgagtagcggaccacggaggcccggagtctgcgcagggccagccagtaagcacgcaccagtaacaggttacacagcaggcattctccgccggtgcgcccgcgcccccggccgtgtttcagcacggtggccatcagagggcccaggtcgaggtcgggctgggcatcgggttcggtaaactgcgcaaagcgcggagccacgtcgcgcgtgcgtgccccgcgatgcgcttcccaggactggcggaccgtggcgcgacgggcctccgcggcagcgcgcagctggggccccgactcccagacggcgggggtgccggcgaggagcaacaggaccagatccgcgtacgcccacgtatccggcgactcctccggctcgcggtccccggcgaccgtctcgaattccccgttgcgagcggcggcgcgagtacagcagctgtccccgcccccgcgccgaccctccgtgcagtccaggagacgggcgcaatccttccagttcatcagcgcggtggtgagcgacggctgcgtgccggatcccgccgccgaccccgccccctcctcgcccccggaggccaaggttccgatgagggcccgggtggcagactgcgccaggaacgagtagttggagtactgcaccttggcggctcccggggagggcgagggcttgggttgcttctgggcatgccgcccgggcaccccgccgtcggtacggaagcagcagtggagaaaaaagtgccggtggatgtcgtttatggtgagggcaaagcgtgcgaaggagccgaccagggtcgccttcttggtgcgcagaaagtggcggtccatgacgtacacaaactcgaacgcggccacgaagatgctagcggcgcagtggggcgcccccaggcatttggcacagagaaacgcgtaatcggccacccactgaggcgagaggcggtaggtttgcttgtacagctcgatggtgcggcagaccagacagggccggtccagcgcgaaggtgtcgatggccgccgcggaaaagggcccggtgtccaaaagcccctccccacagggatccgggggcgggttgcggggtcctccgcgcccgcccgaaccccctccgtcgcccgcccccccgcgggcccttgagggggcggtgaccacgtcggcggcgacgtcctcgtcgagcgtaccgacgggcggcacacctatcacgtgactggccgtcaggagctcggcgcagagagcctcgttaagagccaggaggctgggatcgaaggccacatacgcgcgctcgaacgcccccgccttccagctgctgccgggggactcttcgcacaccgcgacgctcgccaggaccccggggggcgaagttgccatggctgggcgggaggggcgcacgcgccagcgaactttacgggacacaatccccgactgcgcgctgcggtcccagaccctggagagtctagacgcgcgctacgtctcgcgagacggcgcgcatgacgcggccgtctggttcgaggatatgacccccgccgagctggaggttgtcttcccgactacggacgccaagctgaactacctgtcgcggacgcagcggctggcctccctcctgacgtacgccgggcctataaaagcgcccgacgacgccgccgccccgcagaccccggacaccgcgtgtgtgcacggcgagctgctcgcccgcaagcgggaaagattcgcggcggtcattaaccggttcctggacctgcaccagattctgcggggctgacgcgcgtgctgttgggcgggacggttcgcgaaccctttggtgggtttacgcgggcacgcacgctcccatcgcgggcgccatggcgggactgggcaagccctacaccggccacccaggtgacgccttcgagggtctcgttcagcgaattcggcttatcgtcccatctacgttgcggggcggggacggggaggcgggcccctactctccctccagcctcccctccaggtgcgcctttcagtttcatggccatgacgggtccgacgagtcgtttcccatcgagtatgtactgcggcttatgaacgactgggccgaggtcccgtgcaacccttacctgcgcatacagaacaccggcgtgtcggtgctgtttcaggggttttttcatcgcccacacaacgcccccgggggcgcgattacgccagagcggaccaatgtgatcctgggctccaccgagacgacggggctgtccctcggcgacctggacaccatcaaggggcggctcggcctggatgcccggccgatgatggccagcatgtggatcagctgctttgtgcgcatgccccgcgtgcagctcgcgtttcggttcatgggccccgaagatgccggacggacgagacggatcctgtgccgcgccgccgagcaggctattacccgtcgccgccgaacccggcggtcccgggaggcgtacggggccgaggccgggctgggggtggccggaacgggtttccgggccaggggggacggttttggcccgctccccttgttaacccaagggccctcccgcccgtggcaccaggccctgcggggtcttaagcacctacggattggcccccccgcgctcgttttggcggcgggactcgtcctgggggccgctatttggtgggtggttggtgctggcgcgcgcctataaaaaaggacgcaccgccgccctaatcgccagtgcgttccggacgccttcgccccacacagccctcccgaccgacacccccatatcgcttcccgacctccggtcccgatggccgtcccgcaatttcaccgccccagcaccgttaccaccgatagcgtccgggcgcttggcatgcgcgggctcgtcttggccaccaataactctcagtttatcatggataacaaccacccgcacccccagggcacccaaggggccgtgcgggagtttctccgcggtcaggcggcggcgctgacggaccttggtctggcccacgcaaacaacacgtttaccccgcagcctatgttcgcgggcgacgccccggccgcctggttgcggcccgcgtttggcctgcggcgcacctattcaccgtttgtcgttcgagaaccttcgacgcccgggaccccgtgaggcccggggagttccttctggggtgttttaatcaataaaagaccacaccaacgcacgagccttgcgtttaatgtcgtgtttattcaagggagtgggatagggttcgacggttcgaaacttaacacaccaaataatcgagcgcgtctagcccagtaacatgcgcacgtgatgtaggctggtcagcacggcgtcgctgtgatgaagcagcgcccggcgggtccgctgtaactgctgttgtaggcggtaacaggcgcggatcagtaccgccagggcgctacgaccggtgcgttgcacgtagcgtcgcgacagaactgcgtttgccgatacgggcggggggccgaattgtaagcgcgtcacctcttgggagtcatcggcggataacgcactgaatggttcgttggttatgggggagtgtggttccccagggagtgggtcgagcgcctcggcctcggaatccgagaggaacaacgaggtggcgtcggagtcttcgtcgtcagagacatacagggtctgaagcagcgacacgggcgggggggtagcgtcgatgtgtagcgcgagggaggatgcccacgaagacaccccagacaaggagctgcccgtgcgtggatttgtggaagacgcggaagccgggacggatgggcggttttgcggtgcccggaaccgaaccgccggatactccccgggtgctacatgcccgttttggggctggggttggggctggggttggggctggggttggggctggggttggggctggggttggggctggggttggggttggggttggggctggggttggggttggggctggggctggggctggggctggggctggggctggggctggggctggggctggggctggggctggggctggggctggggctggggctggggctggggttggggcgcggacaggcggctgacggtcaaatgcccccgggggcgcgcagatgtggtgggcgtggccaccggctgccgtgtagtggggcggcgggaaaccgggcctccgggcgcaacaccgccctccagcgtcaagtatgtggggggcgggcctgacgtcgggggcggggcgacgggttggaccgcgggaggcgggggagagggacctgcgggagaggatgaggtcggctcggccgggttgcggcctaaaacaggggccgtggggtcggcggggtcccagggtgaagggagggattcccgcgattcggacagcgacgcgacagcggggcgcgtaaggcgccgctgcggcccgcctacgggaaccctggggggggttggcgcgggacccgaggttagcggggggcggcggttttcgcccccgggcaaaaccgtgccggttgcgaccgggggcggaacgggatcgatagggagagcgggagaagcctggccggcggcctggggcccgagcgggaggggcacaccagacaccaaagcgtggggcgctggctctgggggtttgggaggggccggggggcgcgcgaaatcggtaaccggggcgaccgtgtcggggagggcaggcggccgccaaccctgggtggtcgcggaagcctgggtggcgcgcgccagggagcgtgcccggcggtgtcggcgcgcgcgcgacccggacgaagaagcggcagaagcgcgggaggaggcgggggggcggggggcggtggcatcggggggcgccggggaactttggggggacggcaagcgccggaagtcgtcgcgggggcccacgggcgccggccgcgtgctttcggccgggacgcccggtcgtgcttcgcgagccgtgactgccggcccagggggccgcggtgcacactgggacgtggggacggactgatcggcggtgggcgaaagggggtccggggcaaggaggggcgcggggccgccggagtcgtcagacgcgagctcctccaggccgtgaatccatgcccacatgcgaggggggacgggctcgccgggggtggcgtcggtgaatagcgtgggggccaggcttccgggccccaacgagccctccgccccaacaaggtccacagggccgggggtcgggttcgggaccgaggggctctggtcgtcgggggcgcgctggtacaccggatgccccgggaatagctcccccgacaggagggaggcgtcgaacggccgcccgaggatagctcgcgcgaggaaggggtcctcgtcggtggcgctggcggcgaggacgtcctcgccgcccgccacaaacgggagctcctcggtggcctcgctgccaacaaaccgcacgtcgggggggccgggggggtccgggttttcccacaacaccgcgaccggggtcatggagatgtccacgagcaccagacacggcgggccccgggcgaggggccgctcggcgatgagcgcggacaggcgcgggagctgtgccgccagacacgcgttttcgatcgggttcaggtcggcgtgcaggaggcggacggcccacgtctcgatgtcggacgacacggcatcgcgcaaggcggcgtccggcccgcgagcgcgtgagtcaaacagcgtgagacacagctccagctccgactcgcgggaaaaggccgtggtgttgcggagcgccacgacgacgggcgcgcccaggagcactgccgccagcaccaggtccatggccgtaacgcgcgccgcgggggtgcggtgggtggcggcggccggcacggcgacgtgctggcccgtgggccggtagagggcgttggggggagcggggggtgacgcctcgcgcccccccgaggggctcagcgtctgcccagattccagacgcgcggtcagaagggcgtcgaaactgtcatactctgtgtagtcgtccggaaacatgcaggtccaaagagcgaccagagcggtgcttgggagacacatgcgcccgaggacgctcaccgccgccagcgcctgggcgggactcagctttcccagcgcggcgccgcgctcggttcccagctcggggaccgagcgccagggcgccagggggtcggtttcggacaacttgccgcggcgccagtctgccagccgcgtgccgaacatgaggccccgggtcggagggcctccggccgaaaacgctggcagcacgcggatgcgggcgtctggatgcggggtcaggcgctgcacgaatagcatggaatctgctgcgttctgaaacgcacgggggagggtgagatgcatgtactcgtgttggcgaaccagatccaggcgccaaaaggtgtaaatgtgttccggggagctggccaccagcgccaccagcacgtcgttctcgttaaaggaaacgcggtgcctagtggagctctggggtccgagcggcggccccggggccgccgcgtcacccccccattccagctgggcccagcgacacccaaactcgcgcgtgagagtggtcgcgacgagggcgacgtagagctcggccgccgcatccatcgaggccccccatctcgcctggcggtggcgcacaaagcgtccgaagagctgaaagttggcggcctgggcgtcgctgagggccagctgaagccggttgatgacggtgaggacgtacatggccgtgacggtcgaggccgactccagggtgtccgtcggaagcggggggcgaatgcatgccgcctcgggacacatcagcagcgcgccgagcttgtcggtcacggccgggaagcagagcgcgtactgcagtggcgttccatccgggaccaaaaagctgggggcgaacggccgatccagcgtactggtggcctcgcgcagcaccaggggccccgggcctccgctcactcgcaggtacgcctcgccccggcggcgcagcatctgcgggtcggcctcttggccgggtggggcggacgcccgggcgcgggcgtctagggcgcgaagatccacgagcaggggcgcgggcgcggccgccgcgcccgcgcccgtctggcctgtggccttggcgtacgcgctatataagcccatgcggcgttggatgagctcccgcgcgccccggaactcctccaccgcccatggggccaggtccccggccaccgcgtcgaattccgccaacaggccccccagggtgtcaaagttcatctcccaggccacccttggcaccacctcgtcccgcagccgggcgctcaggtcggcgtgttgggccacgcgccccccgagctcctccacggccccggcccgctcggcgctcttggcgcccaggacgccctggtacttggcgggaaggcgctcgtagtcccgctgggctcgcagccccgacacagtgttggtggtgtcctgcagggcgcgaagctgctcgcatgccgcgcgaaatccctcgggcgatttccaggcccccccgcgaacgcggccgaagcgaccccatacctcgtcccactccgcctcggcctcctcgagagacctccgcagggcctcgacgcggcgacgggtgtcgaagagcgcctgcaggcgcgcgccctgtcgcgtcaggaggcccgggccgtcgccgctggccgcgcttagcgggtgcgtctcaaaggtacgctgggcatgttccaaccaggcgaccgcctgcacgtcgagctcgcgcgccttctccgtctggtccaccagaatttcgacctgatccgcgatctcctccgccgagcgcgcctggtccagcgtcttggccacggtcgccgggacggcgaccaccttcagcagggtcttcagattggccagaccctcggcctcgagctgggcccggcgctcgcgcgcggccagcacctcccgcagccccgccgtgacccgctcggtggcttcggcgcgctgctgtttggcgcgcaccacggcgtccttggtatcggccaggtcctgtcgggtcacgaatgcgacgtagtcggcgtacgccgtgtccttcacggggctctggtccacgcgctccagcgccgccacgcacgccaccagcgcgtcctcgctcgggcagggcagggtgacccctgcccggacaagctcggcggccgccgccgggtcgttgcgcaccgcggatatctcctccgcggcggcggccaggtccagcgccacgcttccgatcgcgcgccgcgcgtcggcccggagggcgtccaggcgatcgcggatatccacgtactcggcgtagcccttttgaaaaaacggcacgtactggcgcagggccggcacgccccccaagtcttccgacaggtgtaggacggcctcgtggtagtcgataaacccgtcgttcgcctgggcccgctccagcagcccccccgccagccgcagaagccgcgccaggggctcggtgtccacccgaaacatgtcggcgtacgtgtcggccgcggccccgaaggccgcgctccagtcgatgcggtgaatggctgcgagcggggggagcatggggtggcgctggttctcgggggtgtatgggttaaacgcaagggccgtctccagggcaagggtcaccgccttggcgttggttcccagcgcctgttcggcccgctttcggaagtcccgggggttgtagccgtgcgtgcccgccagcgcctgcaggcgacggagctcgaccacgtcaaactcggcaccgctttccacgcggtccagcacggcctccacgtcggcggcccagcgctcgtggctactgcgggcgcgctgggccgccatcttctctctgaggtcggcggtggcggcctcaagttcgtcggcgcggcgtcgcgtggcgccgatgacctttcccagctcctgcagggcgcgcccgctgggggagtggtccccggccgtcccttcggcgtgcaacaggcccccgaacctgccctcgtggcccgcgaggctttcccgcgcgccggtggtcgcgcgcgtcgcggcctggatcagggaggcatgctctccctccggttggttggcggcccggcgcacctggacgacaaggtcggcggcagccgaccctaaggtcgtgagctgggcgatggccacccgcgcgtccagggccaaccgagtcgccttgacgtatcccgcggcgctgtcggccatggccgctaggaaggccaggggggaggccgggtcgctggcggccgcgcccagggccgtcaccgcgtcgaccaggacgcggtgcgcccgcacggccgcatccaccgtcgacgcagggtctgccgttgcgacggcggcgctgccggcgttgatggcgttcgagacggcgtgggctatgatcggggcgtgatcggcgaagaactgcaagagaaacggagtctctggggcgtcggcgaacaggttcttcagcaccaccacgaagctgggatgcaagccagacagagccgtcgccgtgtccggagtcgggtgctccagggcatctcggtactgccccagcagcccccacatgtccgcccgcagcgccgccgtaacctcagggggcgccccccgaacggcctcggggaggtccgaccagcccgccggcagggaggcccgcagggtcgccaggacggccggacaggcctttagccccacaaagtcagggagggggcgcaggaccccctggagtttgtgcaagaacttctcccgggcgtcgcgggccaccttcgcccgctcccgcgctccctcgagcattgcctccagggagcgcgcgcgctcccgcaaacgggcacgcgcatcgggggcgagctctgccgtcagcttggcggcatccatggcccgcgcctgccgcagcgcttcctcggccatgcgcgtggcctctggcgacagcccgccgtcgtcggggtagggcgacgcgccgggcgcaggaacaaaggccgcgtcgctgtccagctgctggcccagggccgcatctagggcgtcgaagcgccgcagctcggccagacccgagctgcggcgcgcctgttggtcgttaatgtcgcggatgctgcgcgccagctcgtccagtggcttgcgttctatcagcccttggttggcggcgtccgtcaggacggagagccaggccgccaggtcctcgggggcgtccagcgtctggccccgctggatcagatcccgcaacaggatggccgtggggctggtcgcgatcgggggcggggcgggaatggcggcgcgctgcgcgatgtcccgcgtgtgctggtcgaagacaggcagggactcgagcagctggaccacgggcacgacggcggccgaagccacgtgaaaccggcggtcgttgttgtcgctggcctgtagagccttggcgctgtatacggccccccggtaaaagtactccttaaccgcgccctcgatcgcccgacgggcctgggtccgcacctcctccagccgaacctgaacggcctcggggcccagggggggtgggcgcggagccccctgcggggccgccccggccggggcgggcattacgccgaggggcccggcgtgctgtgagaccgcgtcgaccccgcgagcgagggcgtcgagggcctcgcgcatctggcgatcctccgcctccaccctaatctcttcgccacgggcaaatttggccagagcctggactctatacagaagcggttctgggtgcgtcggggtggcgggggcaaaaagggtgtccgggtgggcctgcgagcgctccagaagccactcgccgaggcgtgtatacagattggccggcggggccgcgcgaagctgcagctccaggtccgcgagttccccgtaaaaggcgtccgtctcccgaatgacatccctagccacaaggatcagcttcgccagcgccaggcgaccgatcagagagttttcgtccagcacgtgctggacgaggggcagatgggcggccacgtcggccaggctcaggcgcgtggaggccagaaagtcccccacggccgttttccagggcagcatgttcagggtaaactccagcagggcggcggccgggccggccaccccggcctgggtgtgcgtccgggccccgttctcgatgagaaaggcgaggacgcgttcaaagaaaaaaataacacagagctccagcagccccggagaggccggatacggcgaccgtaaggcgctgatggtgagccgcgaacacgcggcgacctcgcgggccagggcggcggagcacgcggtgaacttaaccgccgtggcggccacgtttgggtgggcctcgaacagctgggcgaggtctgcgcccgggggctcgggcgagcggcgagtcttcagcgcctcgagggcctgtgaggacgccggaaccgtgggcccgtcgtcctcgcccgcctcggcgaccggcggcccggccgggtcggggggtgccgaggcgaggacaggctccggaacggaggcggggaccgcggccccgacgggggttttgcctttgggggtggatttcttcttggttttggcagggggggccgagcgtttcgttttctcccccgaagtcaggtcttcgacgctggaaggcggagtccaggtgggtcggcggcgcttgggaaggccggccgagtagcgtgcccggtgccgaccaaccgggacgacgcccatctccaggacccgcatgtcgtcgtcatcttcttcggccgcctctgcggcgggggtcttgggggcggagggaggcggtggtgggatcgcggagggtgggtcggcggagggtgggtcggcggaggggggatccgtgggtggggtacccttcagggccaccgcccatacatcgtcgggcgcccgattcgggcgcttggcctctggttttgccgacggaccggccgtcccccgggatgtctcggaggccctgtcgtcgcgacgggcccgggtcggtggcggcgactgggcggctgtgggcgggtgtggccccgggccccctaccccctcccgggggcccacgccgacgcagggctcccccaggcccgcgatctcgccccgcagggggtgcgtgatggccacgcgccgttcgctgaacgcttcgtcctgcaggtaagtctcgctggccccgtaaagatgcagagccgcggccgtcaagtccgcaggagccgcgggttccgggcccgacggcacgaaaaacaccatggctcccgcccaccgtacgtccgggcgatcgcgggtgtaatacgtcaggtatggatacatgtcccccgcccgcactttggcgatgaacgcgggggtgccctccggaaggccgtgcgggtcaaaaaggtatgcggtgtcgccgtccctgaacagccccatccctagggggccaatggttaggagcgtgtacgacagggggcgcagggcccacgggccggcgaagaacgtgtgtgcggggcattgtgtctccagcaggcccgccgcgggctccccgaagaagcccacctcgccgtatacgcgcgagaagacacagcgcagtccgccgcgcgcccctgggtactcgaggaagttggggagctcgacgatcgaacacatgcgcggcggcccagggcccgcggtcgcgcgcgtccactcgcccccctcgaccaaacatccctcgatggcctccgcggacaggacgtcgcgagggcccacatcaaatatgaggctgagaaaggacagcgacgagcgcatgcacgataccgacccccccggctccaggtcgggcgcgaactggttccgagcaccggtgaccacgatgtcgcgatcccccccgcgttccatcgtggagtgcggtggggtgcccgcgatcatatgtgccctgctggccagagacccggcctgtttatggaccggacccccggggttagtgttgtttccgccacccatgcccccgtaccatggccccggttcccctgattaggctacgagtcgcggtgatcgcttcccaaaaaccgagctgcgtttgtctgtcttggtcttccacccccccccccgcccgcccgcacaccataacaccgagaacaacacacgggggtgggcgtaacataataaagctttattggtaactagttaacggcaagtccgtgggtggcgcgacggtgtcctccgggatcatctcgtcgtcctcgacgggggtgttggaatgaggcgccccctcgcggtccgcctggcgtgggccgtgcccataggcctccggcttctgtgcgtccatgggcataggcgcggggagactgtttccggcgtcgcggacctccaggtccctgggagactccggtccggctaacggacgaaacgcggaagcgcgaaacacgccgtcggtgacccgcaggagctcgttcatcagtaaccaatccatactcagcgtaacggccagcccctggcgagacagatccacggagtccggaaccgcggtcgtctggcccagggggccgaggctgtagtccccccaggcccctaggtcgcgacggctcgtaagcacgacgcggtcggccgcggggctttgcgggggggcgtcctcgggcgcatgcgccattacctctcggatggccgcggcgcgctggtcggccgagctgaccaagggcgccacgaccacggcgcgctccgtctgcaggcccttccacgtgtcgtggagttcctggacaaactcggccacgggctcgggtcccgcggccgcgcgcgcggcttgatagcaggccgacagacgccgccagcgcgctagaaactgacccatgaagcaaaacccggggacctggtctcccgacagcagcttcgacgcccgggcgtgaatgccggacacgacggacagaaacccgtgaatttcgcgccggaccacggccagcacgttgtcctcgtgcgacacctgggccgccagctcgtcgcacacccccaggtgcgccgtggtttcggtgatgacggaacgcaggctcgcgagggacgcgaccagcgcgcgcttggcgtcgtgatacatgctgcagtactgactcaccgcgtcccccatggcctcggggggccagggccccaggcggtcgggcgtgtccccgaccaccgcatacaggcggcgcccgtcgctctcgaaccgacactcgaaaaaggcggagagcgtgcgcatgtgcagccgcagcagcacgatggcgtcctccagttggcgaatcagggggtctgcgcgctcggcgaggtcctgcagcaccccccgggcggccagggcgtacatgctaatcaacaggaggctggtgcccacctcggggggcggggggggctgcagctggaccaggggccgcagctgctcgacggcacccctggagatcacgtacagctcccggagcagctgctctatgttgtcggccatctgcatagtggggccgaggccgccccgggcggccggttcgaggagggtgatcagcgcgcccagtttggtgcgatggccctcaaccgtggggagatagcccagcccaaagtcccgggcccaggccaacacacgcagggcgaactcgaccgggcggggaaggtaggccgcgctacacgtggccctcagcgcgtccccgaccaccagggccagaacgtaggggacgaagcccgggtcggcgaggacgttggggtgaatgccctcgagggcggggaagcggatctgggtcgccgcggccaggtggacagagggggcgtggctgggctgcccgacggggagaagcgcggacagcggcgtggccggggtggtgggggtgatgtcccagtgggtctgaccatacacgtcgatccagatgagcgccgtctcgcggagaaggctgggttgaccggaactaaagcggcgctcggccgtctcaaactcccccacgagcgcccgccgcaggctcgccagatgttccgtcggcacggccggacccatgatacgcgccagcgtctggcttagaacgccccccgacaggccgaccgcctcgcagagccgcccgtgcgtgtgctcgctggcgccctggacccgcctgaaagtttttacgtagttggcatagtacccgtattcccgcgccaacccaaacacgttcgaccccgcgagggcaatgcacccaaagagctgctggacttcgccgagtccgtggccggtgggcgtccgcgcggggacgcccgccgccagaaacccctccagggccgaaaggtagtgcgtgcagtgcgagggcgtgaacccagcgtcgatcagggtgttgatcaccacggagggcgaattggtattctggatcaacgtccacgtctgctgcagcagagccagcagccgctgctgggcgccggcggagggctgctccccgagctgcagcaggctggagacggcaggctggaagactgccagtgccgacgaactcaggaacggcacgtcgggatcaaacacggccacgtccgtccgcacgcgcgccattagcgtccccgggggcgcacaggccgagcgcgggctgacgcggctgagggccgtcgacacgcgcacctcctcgcggctgcgaaccatcttgttggcctcgagcggcggaatcattatggccgggtcgatctcccgcacggtgtgctgaaactgcgccaacaggggcggcgggaccacagccccccgctcgggggtcgtcaggtactcgtccaccagggccaacgtaaagagggcccgtgtgaggggagtgagggtcgcgtcgtctatgcgctggaggtgcgccgagaacagcgtcacccgattactcaccagggccaagaaccggaggccctcttgcacgaacggggcggggaagagcaggctgtacgccggggtggtaaggttcgcgctgggctgccccaacgggaccggcgccatcttgagcgacgtctccccaagggcctcgatggaggtccgcgggctcatggccaagcagctcttggtgacggtttgccagcggtctatccactccacggcgcactggcggacgcggaccggccccagggccgccgcggtgcgcaggccggcggaatccagcgcatgggacgtgtcggagccggtgaccgcgaggatggtgtccttgatgacctccatctcccggaaggcctggtcgggggcctcggggagagccaccaccaagcggtgtacgagcaacccggggaggttctcggccaagagcgccgtctccggaagcccgtgggcccggtggagcgcgcacaggtgttccagcagcggccgccagcatgcccgcgcgtctgccggggcgatggccgttcccgacaacagaaacgccgccatggcggcgcgcagcttggccgtggccagaaacgccgggtcgtccgccccgtttgccgtctcggccgtgggggttggcggttggcgaaggccggctaggctcgccaataggcgctgcataggtccgtccgagggcggaccggcgggtgaggtcgtgacgacgggggcctcggacgggagaccgcggtctgccatgacgcccggctcgcgtgggtgggggacagcgtagaccaacgacgagaccgggcgggaatgactgtcgtgcgctgtagggagcggcgaattatcgatcccccgcggccctccaggacccccgcaggcgttgcgagtaccccgcgtcttcgcggggtgttatacggccacttaagtcccggcatcccgttcgcggacccaggcccgggggattgtccggatgtgcgggcagcccggacggcgtgggttgcggactttctgcggggcggcccaaatggccctttaaacgtgtgtatacggacgcgccgggccagtcggccaacacaacccaccggaggcggtagccgcgtttggctgtggggtgggtggttccgccttgcgtgagtgtcctttcgacccccccccccctccctcccccgggtcttgctaggtcgcgatctggggtcgcaatgaagaccaatccgctacccgcaaccccttccgtgtggggcgggagtaccgtggaactcccccccacaacacgcgataccgcgggacagggcctgcttcggcgcgtcctgcgccccccgatctctcgccgcgacggcccagggctccccagggggtcgggaccccggagggcggccagcacgctgtggttgcttggcctggacggcacagacgcgccccctggggcgctgacccccaacgacgataccgaacaggccctggacaagatcctgcggggcaccatgcgcgggggggcggccctgatcggctccccgcgccatcatctaacccgccaagtgatcctgacggatctgtgccaacccaacgcggatcgtgctgggacgctgcttctggcgctgcggcaccccgccgacctgcctcacctggcccaccagcgcgccccgccaggccggcagaccgagcggctgggcgaggcctggggccagctgatggaggcgaccgccctggggtcggggcgagccgagagcgggtgcacgcgcgcgggcctagtgtcgtttaacttcctggtggcggcgtgtgccgcctcgtacgacgcgcgcgacgccgccgatgcggtacgggcccacgtcacggccaactaccgcgggacgcgggtgggggcgcgcctggatcgtttttccgagtgtctgcgcgccatggttcacacgcacgtcttcccccacgaggtcatgcggtttttcggggggctggtgtcgtgggtcacccaggacgagctagcgagcgtcaccgccgtgtgcgccgggccccaggaggcggcgcacaccggccacccgggccggccccgctcggccgtgatcctcccggcatgtgcgttcgtggacctggacgccgagctggggctggggggcccgggcgcggcgtttctgtacctggtattcacttaccgccagcgccgggaccaggagctgtgttgtgtgtacgtgatcaagagccagctccccccgcgcgggttggagccggccctggagcggctgtttgggcgcctccggatcaccaacacgattcacggcaccgaggacatgacgcccccggccccaaaccgaaaccccgacttccccctcgcgggcctggccgccaatccccaaaccccgcgttgctcggctggccaggtcacgaacccccagttcgccgacaggctgtaccgctggcagccggacctgcgggggcgccccaccgcacgcacctgtacgtacgccgcctttgcagagctcggcatgatgcccgaggatagtccccgctgcctgcaccgcaccgagcgctttggggcggtcagcgtccccgttgtcattctggaaggcgtggtgtggcgccccggcgagtggcgggcatgcgcgtgagcgtagcaaacgccccgcccacacaacgctccgcccccaaccccttccccgctgtcactcgttgttcgttgacccgggcgtccgccaaataaagccactgaaacccgaaacgcgagtgttgtaacgtcctttgggcgggaggaagccacaaaatgcaaatgggatacatggaaggaacacacccccgtgactcaggacatcggtgtgtccttttgggtttcactgaaactggcccgcgccccacccctgcgcgatgtggataaaaagccagcgcgggtggtttagggtaccacaggtgggtgctttggaaacttgccggtcgccgtgctcctgtgagcttgcgtccctccccggtttcctttgcgctcccgccttccggacctgctctcgcctatcttctttggctctcggtgcgattcgtcaggcagcggccttgtcgaatctcgaccccaccactcgccggacccgccgacgtcccctctcgagcccgccgaaacccgccgcgtctgttgaaatggccagccgcccagccgcatcctctcccgtcgaagcgcgggccccggttgggggacaggaggccggcggccccagcgcagccacccagggggaggccgccggggcccctctcgcccacggccaccacgtgtactgccagcgagtcaatggcgtgatggtgctttccgacaagacgcccgggtccgcgtcctaccgcatcagcgatagcaactttgtccaatgtggttccaactgcaccatgatcatcgacggagacgtggtgcgcgggcgcccccaggacccgggggccgcggcatcccccgctcccttcgttgcggtgacaaacatcggagccggcagcgacggcgggaccgccgtcgtggcattcgggggaaccccacgtcgctcggcggggacgtctaccggtacccagacggccgacgtccccaccgaggcccttgggggcccccctcctcctccccgcttcaccctgggtggcggctgttgttcctgtcgcgacacacggcgccgctctgcggtattcgggggggagggggatccagtcggccccgcggagttcgtctcggacgaccggtcgtccgattccgactcggatgactcggaggacacggactcggagacgctgtcacacgcctcctcggacgtgtccggcggggccacgtacgacgacgcccttgactccgattcgtcatcggatgactccctgcagatagatggccccgtgtgtcgcccgtggagcaatgacaccgcgcccctggatgtttgccccgggacccccggcccgggcgccgacgccggtggtccctcagcggtagacccacacgcgccgacgccagaggccggcgctggtcttgcggccgatcccgccgtggcccgggacgacgcggaggggctttcggacccccggccacgtctgggaacgggcacggcctaccccgtccccctggaactcacgcccgagaacgcggaggccgtggcgcgctttctgggagatgccgtgaaccgcgaacccgcgctcatgctggagtacttttgccggtgcgcccgcgaggaaaccaagcgtgtcccccccaggacattcggcagcccccctcgcctcacggaggacgactttgggcttctcaactacgcgctcgtggagatgcagcgcctgtgtctggacgttcctccggtcccgccgaacgcatacatgccctattatctcagggagtatgtgacgcggctggtcaacgggttcaagccgctggtgagccggtccgctcgcctttaccgcatcctgggggttctggtgcacctgcggatccggacccgggaggcctcctttgaggagtggctgcgatccaaggaagtggccctggattttggcctgacggaaaggcttcgcgagcacgaagcccagctggtgatcctggcccaggctctggaccattacgactgtctgatccacagcacaccgcacacgctggtcgagcgggggctgcaatcggccctgaagtatgaggagttttacctaaagcgttttggcgggcactacatggagtccgtcttccagatgtacacccgcatcgccggctttttggcctgccgggccacgcgcggcatgcgccacatcgccctggggcgagaggggtcgtggtgggaaatgttcaagttctttttccaccgcctctacgaccaccagatcgtaccgtcgacccccgccatgctgaacctggggacccgcaactactacacctccagctgctacctggtaaacccccaggccaccacaaacaaggcgaccctgcgggccatcaccagcaacgtcagtgccatcctcgcccgcaacgggggcatcgggctatgcgtgcaggcgtttaacgactccggccccgggaccgccagcgtcatgcccgccctcaaggtccttgactcgctggtggcggcgcacaacaaagagagcgcgcgtccgaccggcgcgtgcgtgtacctggagccgtggcacaccgacgtgcgggccgtgctccggatgaagggggtcctcgccggcgaagaggcccagcgctgcgacaatatcttcagcgccctctggatgccagacctgtttttcaagcgcctgattcgccacctggacggcgagaagaacgtcacatggaccctgttcgaccgggacaccagcatgtcgctcgccgactttcacggggaggagttcgagaagctctaccagcacctcgaggtcatggggttcggcgagcagatacccatccaggagctggcctatggcattgtgcgcagtgcggccacgaccgggagccccttcgtcatgttcaaagacgcggtgaaccgccactacatctacgacacccagggggcggccatcgccggctccaacctctgcaccgagatcgtccatccggcctccaagcgatccagtggggtctgcaacctgggaagcgtgaatctggcccgatgcgtctccaggcagacgtttgactttgggcggctccgcgacgccgtgcaggcgtgcgtgctgatggtgaacatcatgatcgacagcacgctacaacccacgccccagtgcacccgcggcaacgacaacctgcggtccatgggaatcggcatgcagggcctgcacacggcctgcctgaagctggggctggatctggagtctgccgaatttcaggacctgaacaaacacatcgccgaggtgatgctgctgtcggcgatgaagaccagcaacgcgctgtgcgttcgcggggcccgtcccttcaaccactttaagcgcagcatgtatcgcgccggccgctttcactgggagcgctttccggacgcccggccgcggtacgagggcgagtgggagatgctacgccagagcatgatgaaacacggcctgcgcaacagccagtttgtcgcgctgatgcccaccgccgcctcggcgcagatctcggacgtcagcgagggctttgcccccctgttcaccaacctgttcagcaaggtgacccgggacggcgagacgctgcgccccaacacgctcctgctaaaggaactggaacgcacgtttagcgggaagcgcctcctggaggtgatggacagtctcgacgccaagcagtggtccgtggcgcaggcgctcccgtgcctggagcccacccaccccctccggcgattcaagaccgcgtttgactacgaccagaagttgctgatcgacctgtgtgcggaccgcgccccctacgtcgaccatagccaatccatgaccctgtatgtcacggagaaggcggacgggaccctcccagcctccaccctggtccgccttctggtccacgcatataagcgcggactaaaaacagggatgtactactgcaaggttcgcaaggcgaccaacagcggggtctttggcggcgacgacaacattgtctgcatgagctgcgcgctgtgaccgacaaaccccctccgcgccaggcccgccgccactgtcgtcgccgtcccacgctctcccctgctgccatggattccgcggccccagccctctcccccgctctgacggcccttacgggccagagcgcgacggcggacctggcgatccagattccaaagtgccccgaccccgagaggtacttctacacctcccagtgtcccgacattaaccacctgcgctccctcagcatccttaaccgctggctggaaaccgagcttgttttcgtgggggacgaggaggacgtctccaagctttccgagggcgagctcagcttttaccgcttcctcttcgctttcctgtcggccgccgacgacctggttacggaaaacctgggcggcctctccggcctgtttgagcagaaggacattctccactactacgtggagcaggaatgcatcgaagtcgtacactcgcgcgtgtacaacatcatccagctggtgcttttccacaacaacgaccaggcgcgccgcgagtacgtggccggtaccatcaaccacccggccatccgcgccaaggtggactggttggaagcgcgggtgcgggaatgcgcctccgttccggaaaagttcattctcatgatcctcatcgagggcatcttttttgccgcctcgtttgccgccatcgcctaccttcgcaccaacaaccttctgcgggtcacctgccagtcaaacgacctcatcagccgggacgaggccgtgcacacgacggcctcgtgttacatctacaacaactacctcggcgggcacgccaagcccccgcccgaccgcgtgtacgggctgttccgccaggcggtcgagatcgagatcggatttatccgatcccaggcgccgacggacagccatatcctgagcccggcggcgctggcggccatcgaaaactacgtgcgattcagcgcggatcgcctgttgggccttatccacatgaagccactgttttccgccccaccccccgacgccagctttccgctgagcctcatgtccaccgacaaacacaccaattttttcgagtgtcgcagcacctcctacgccggggcggtcgtcaacgatctgtgagtgtcgcggcgcgcttctacccgtgtttgcccataataaacctctgaaccaaactttgggtctcattgtgattcttgtcagggacgcgggggtgggagaggataaaaggcggcgcaaaaagcagtaaccaggtccgtccagattctgcgggcataggataccataattttattggtgggtcgtttgttcggggacaagcgcgctcgtctgacgtttgggctactcgtcccagaatttggccaggacgtccttgtagaacgcgggtgggggggcctgggtccgcaactgctccagaaacctgtcggcgatatcaggggccgtgatatgccgggtcacgatagatcgcgccaggttttcgtcgcggatgtcctggtagataggcaggcgtttcagaagagtccacggcccccgctccttggggccgataagcgatatgacgtacttaatgtagcggtgttccaccagctcggtgatggtcatgggatcggggagccagtccagggactctggggcgtcgtggatgacgtggcgtcgccggttggccacataactgcggtgctcttccagcagctgcgcgttcgggacctggacgagctcgggcggggtgagtatctccgaggaggacgacctggggccggggtggcccccggtaacgtcccggggatccagggggaggtcctcgtcgtcttcgtatccgccggcgatctgttgggttagaatttcggtccacgagacgcgcgtctcggtgccgccggcggccggcggcagagggggcctggtttccgtggagcgcgagctggtgtgttcccggcggatggcccgccgggtctgagagcgactcgggggggtccagtgacattcgcgcagcacatcctccacggaggcgtaggtgttattgggatggaggtcggtgtggcagcggacaaagagggccaggaactgggggtagctcatcttaaagtactttagtatatcgcgacagttgatcgtgggaatgtagcaggcgctaatatccaacacaatatcacagcccatcaacaggaggtcagtgtccgtggtgtacacgtacgcgaccgtgttggtgtgatagaggttggcgcaggcatcgtccgcctccagctgacccgagttaatgtaggcgtaccccagggcccggagaacgcgaatacagaacagatgcgccagacgcagggccggcttcgagggcgcggcggacggcagcgcggctccggacccggccgtcccccgggtccccgaggccagagaggtgccgcgccggcgcatgttggaaaaggcagagctgggtctggagtcggtgatgggggaaggcggtggagaggcgtccacgtcactggcctcctcgtccgtccggcactgggccgtcgtgcgggccaggatggccttggctccaaacacaaccggctccatacaattgaccccgcgatcggtaacgaagatggggaaaagggacttttgggtaaacacctttaataagcgacagaggcagtgtagcgtaatggcctcgcggtcgtaactggggtatcggcgctgatatttgaccaccaacgtgtacatgacgttccacaggtccacggcaatgggggtgaagtacccggccggggccccaaggccccggcgcttgaccagatggtgtgtgtgggcaaacttcatcatcccgaacaaacccatgtcaggtcaattgtaactgcggatcggcctaactaaggcgtggttggtgcgacggtccgggacacccgagcctgtctctctgtgtatggtgacccagacaacaacaccgacacaagaggacaataatccgttaggggacgctctttataatttcgatggcccaactccacgcggattggtgcagcaccctgcatgcgccggtgcgggccaaccttccccccgctcattgcctcttccaaaagggtgtggcctaacgagctgggggcgtatttaatcaggctagcgcggcgggcctgccgtagtttctggctcggtgagcgacggtccggttgcttgggtcccctggctgccatcaaaaccccaccctcgcagcggcatacgccccctccgcgtcccgcacccgagaccccggcccggctgccctcaccaccgaagcccacctcgtcactgtggggtgttcccagcccgcgttgggatgacggattcccctggcggtgtggcccccgcctcccccgtggaggacgcgtcggacgcgtccctcgggcagccggaggagggggcgccctgccaggtggtcctgcagggcgccgaacttaatggaatcctacaggcgtttgccccgctgcgcacgagccttctggactcgcttctggttatgggcgaccggggcatccttatccataacacgatctttggggagcaggtgttcctgcccctggaacactcgcaattcagtcggtatcgctggcgcggacccacggcggcgttcctgtctctcgtggaccagaagcgctccctcctgagcgtgtttcgcgccaaccagtacccggacctacgtcgggtggagttggcgatcacgggccaggccccgtttcgcacgctggttcagcgcatatggacgacgacgtccgacggcgaggccgttgagctagccagcgagacgctgatgaagcgcgaactgacgagctttgtggtgctggttccccagggaacccccgacgttcagttgcgcctgacgaggccgcagctcaccaaggtccttaacgcgaccggggccgatagtgccacgcccaccacgttcgagctcggggttaacggcaaattttccgtgttcaccacgagtacctgcgtcacctttgctgcccgcgaggagggcgtgtcgtccagcaccagcacccaggtccagatcctgtccaacgcgctcaccaaggcgggccaggcggccgccaacgccaagacggtgtacggggaaaatacccatcgcaccttctctgtggtcgtcgacgattgcagcatgcgggcggtgctccggcgactgcaggtcggcgggggcaccctcaagttcttcctcacgacccccgtccccagtctgtgcgtcaccgccaccggtcccaacgcggtatcggcggtatttctcctgaaaccccagaagatttgcctggactggctgggtcatagccaggggtctccttcagccgggagctcggcctcccgggcctctgggagcgagccaacagacagccaggactccgcgtcggacgcggtcagccacggcgatccggaagacctcgatggcgctgcccgggcgggagaggcgggggccttgcatgcctgtccgatgccgtcgtcgaccacgcgggtcactcccacgaccaagcgggggcgctcggggggcgaggatgcgcgcgcggacacggccctaaagaaacctaagacggggtcgcccaccgcacccccgcccgcagatccagtccccctggacacggaggacgactccgatgcggcggacgggacggcggcccgtcccgccgctccagacgcccggagcggaagccgttacgcgtgttactttcgcgacctcccgaccggagaagcaagccccggcgccttctccgccttccgggggggcccccaaaccccgtatggttttggattcccctgacggggcggggccttggcggccgcccaactctcgcaccatcccgggttaatgtaaataaacttggtattgcccaacactttcccgcgtgtcgcgtgtggttcatgtgtgtgcctggcgcccccaccctcgggttcgtgtatttcctttccctgtccttataaaagccgtatgtggggcgctgacggaaccaccccgcgtgccatcacggccaaggcgcgggatgctccgcaacgacagccaccgggccgtgtccccggaggacggccagggacgggtcgacgacggacggccacacctcgcgtgcgtgggggccctggcgcgggggttcatgcatatctggcttcaggccgccacgctgggttttgcgggatcggtcgttatgtcgcgcgggccgtacgcgaatgccgcgtctggggcgttcgccgtcgggtgcgccgtgctgggctttatgcgcgcaccccctcccctcgcgcggcccaccgcgcggatatacgcctggctcaaactggcggccggtggagcggcccttgttctgtggagtctcggggagcccggcacgcagccgggggccccggccccgggcccggccacccagtgcctggcgctgggcgccgcctatgcggcgctcctggtgctcgccgatgacgtctatccgctctttctcctcgccccggggcccctgttcgtcggcaccctggggatggtcgtcggcgggctgacgatcggaggcagcgcgcgctactggtggatcggtgggcccgccgcggccgccctggccgcggcggtgttggcgggcccgggggcgaccaccgccagggactgcttttccagggcttgccccgaccaccgccgcgtctgtgtcatcaccgcaggcgagtctctttcccgccgccccccggaggacccagagcgacccggggttcccgggcccccgtcccccccgaccccccaacgatcccacgggccgccggccgatgaggtcgcaccggccagggtcgcgcggcccgaaaacgtctgggtgcccgtggtcacctttctgggggcgggcgcgcttgccgtcaagacggtgcgagaacatgcccggggaacgccgggcccgggcctgccgctgtggccccaggtgtttctcggaggccatgtggcggtggccctgacggagctgtgtcaggcgcttgcgccctgggaccttacggacccgctgctgtttgttcacgccggactgcaggtcatcaacctcgggttggtgtttcggttttccgaggttgtcgtgtatgcggcgctagggggtgccgtgtggatttcgttggcgcaggtgctggggctccggcgtcgcctgcacaggaaggaccccggggacggggcccggttggcggcgacgcttcggggcctcttcttctccgtgtacgcgctggggtttggggtgggggtgctgctgtgccctccggggtcaacgggcgggcggtcgggcgattgatatatttttcaataaaaggcattagtcccgaagaccgccggtgtgtgatgatttcgccataacacccaaaccccggatggggcccgggtataaattccggaaggggacacgggctaccctcactatcgagggcgcttggtcgggaggccgcatcgaacgcacacccccatccggtggtccgtgtggaggtcgttttcagtgcccggtctcgctttgccgggaacgctagccgatccctcgcgagggggaggcgtcgggcatggccccggggcgggtgggccttgccgtggtcctgtggagcctgttgtggctcggggcgggggtgtccgggggctcggaaactgcctccaccgggcccacgatcaccgcgggagcggtgacgaacgcgagcgaggcccccacatcggggtcccccgggtcagccgccagcccggaggtcaccccacatcgaccccaaaccccaacaatgtcacacaaaacaaaaccacccccaccgagccggccagccccccaacaacccccaagcccacctccacgcccaaaagcccccccacgtccacccccgaccccaaacccaagaacaacaccacccccgccaagtcgggccgccccactaaaccccccgggcccgtgtggtgcgaccgccgcgacccattggcccggtacggctcgcgggtgcagatccgatgccggtttcggaattccacccgcatggagttccgcctccagatatggcgttactccatgggtccgtcccccccaatcgctccggctcccgacctagaggaggtcctgacgaacatcaccgccccacccgggggactcctggtgtacgacagcgcccccaacctaacggacccccacgtgctctgggcggagggggccggcccgggcgccgaccctccgttgtattctgtcaccgggccgctgccgacccagcggctgattatcggcgaggtgacgcccgcgacccagggaatgtattacttggcctggggccggatggacagcccgcacgagtacgggacgtgggtgcgcgtccgcatgttccgccccccgtctctgaccctccagccccacgcggtgatggagggtcagccgttcaaggcgacgtgcacggccgccgcctactacccgcgtaaccccgtggagtttgtctggttcgaggacgaccaccaggtgtttaacccgggccagatcgacacgcagacgcacgagcaccccgacgggttcaccacagtctctaccgtgacctccgaggctgtcggcggccaggtccccccgcggaccttcacctgccagatgacgtggcatcgcgactccgtgacgttctcgcgacgcaatgccaccgggctggccctggtgctgccgcggccaaccatcaccatggaatttggggtccggcatgtggtctgcacggccggctgcgtccccgagggcgtgacgtttgcctggttcctgggggacgacccctcaccggcggctaagtcggccgttacggcccaggagtcgtgcgaccaccccgggctggctacggtccggtccaccctgcccatttcgtacgactacagcgagtacatctgtcggttgaccggatatccggccgggattcccgttctagaacaccacggcagtcaccagcccccacccagggaccccaccgagcggcaggtgatcgaggcgatcgagtgggtggggattggaatcggggttctcgcggcgggggtcctggtcgtaacggcaatcgtgtacgtcgtccgcacatcacagtcgcggcagcgtcatcggcggtaacgcaagacccccccgttacctttttaatatctatatagtttggtcccccctctatcccgcccaccgctgggcgctataaagccgccaccctctcttccctcaggtcatccttggtcgatcccgaacgacacacggcgtggagcaaaacgcctccccctgagccgctttcctaccaacacaacggcatgcctctgcgggcatcggaacacgcctaccggcccctgggccccgggacaccccccatgcgggctcggctccccgccgcggcctgggttggcgtcgggaccatcatcgggggagttgtgatcattgccgcgttggtcctcgtgccctcgcgggcctcgtgggcactttccccatgcgacagcggatggcacgagttcaacctcgggtgcatatcctgggatccgacccccatggagcacgagcaggcggtcggcggctgtagcgccccggcgaccctgatcccccgcgcggctgccaaacagctggccgccgtcgcacgcgtccagtcggcaagatcctcgggctactggtgggtgagcggagacggcattcgggcctgcctgcggctcgtcgacggcgtcggcggtattgaccagttttgcgaggagcccgcccttcgcatatgctactatccccgcagtcccgggggctttgttcagtttgtaacttcgacccgcaacgcgctggggctgccgtgaggcgcgtgtactgcggtctgtctcgtctcctcttctccccttccctccccctccgcatcccaggatcacaccggtcaacgagggttgggggggtccggcacggacccaaaataataaacacacaatcacgtgcgataaaaagaacacgcggtcccctgtggtgtttttggttatttttattaaatctcgtcgacaaacagggggaaaggggcgtggtctagcgacggcagcacgggcggaggcgttcaccggctccggcgtccttcgcgtttaagcttggtcaggagggcgctcagggcggcgacgttggtcgggccgtcgttggtcagggcgttggctcgatggcgggcgaggacgggcgaggggctcaacggcgggggcgggggcccggtgcggcccgggggggaaaatagggcggatcccccccagtcgtacaggggattttccgcctcaatgtacggggaggccggcgctgcattcgccgtgttcacgcagacgttttcgtagacccgcatccatggtatttcctcgtagacacgccccccgtcctcgctcaccgtctcgtatattgactcgtcgtcctcgtagggggcgtgccgttcgcgggccgaggcggcgtgggtggctttgcggcgggcgtcgtcgtcgtcgtcgtcggccgtcagatacgtggcttccatctggtcgggttctccctccggggcgggtccccacacccgtggccgatcgaggctccccagagacgcgcgccggacgaggagggggcacgtcgccgccggcggtcgcctgtcgggtcccgcgacgttacgggccgggaggcgcgggggcacctcccccatgtgcgtgtaatacgtggccggctgtgtggccgcagcggggggctcggcgaccgggtcgttcgcatccggaagcgggggccccgcgccgtccgcgcggcgcctccggaacctccgggtggacgcgggggtcgagtgtaggcgaggtcgggggaggggcgggggctcgttgtcgcgccgcgcccgctgaatcttttcccgacaggtcccaccccccgcgcgatgcccccccgggccgctggccatgtcgtccgggggaggccccgcggaccacgtcgtccggcgagacgccacgagccgcaggatggactcgtagtggagcgacggcgccccgttgcggagcagatccgcggccagggcggccccgaaccaagccttgatgctcaactccatccgggcccagctgggggcggtcatcgtggggaacaggggggcggtggtccgacagaaacgctcctggctgtccaccgcggcccgcagatactcgttgttcaggctgtcggtggcccagacgccgtacccggtgagggtcgcgttgatgatatactgggcgtggtgatggacgatcgacagaacctccaccgtggatacgacggtatccacggtcccgtacgtaccgccgctccgcttgccggtctgccacaggttggctaggcgcgtcaggtggcccaggacgtcgctgaccgccgccctgagcgccatgcactgcatggagccggtcgtgccgctgggaccccggtccagatggcgcgcgaacgtttccgcgggcgcctccgggctgccgccgagcgggaggaaccggcgattggagggactcagccggtgacatacgtgcttgtccgtcgtccacagcatccaggacgcccaccggtacagcacggagacgtaggccaggagctcgttgagccgcagtgcggtgtcggtgctggggcggcttgggtccgccgggcgcataaagaacatgtactgctgaatccgatggagggcgtcgcgcaggccggccacggtggcggcgtacttggccgccacggccccgctcttgaacggggtgcgcgccagcagctttggcgccagggtgggccgcagcagcacgtgaaggctggggtcgcagtcgcccacggggtcctcggggacgtccaggccgctgggcaccaccgtctgcaggtacttccagtactgcgtgaggatggcgcggctcaactggccgccgggcagctccacctcgcccagcgcctgggtggcggccgaagcgtagtgccggatgtactcgtagtgcgggtcgctggcgagcccgtccacgatcaaactctcgggaaccgtgttgtgttgccgcgcggccaaccggacgctgcgatcggtgcaggtcagaaacgccggctgcgcgtcgtcggagcgctgccgcaaggcgcccacggccgcgctaaggagcccctccggggtggggagcagacacccgccgaagatgcgccgctcgggaacgcccgcgttgtcgccgcggatcaggttggcaggcgtcaggcaccgcgccagccgcagggagctcgcgccgcgcgtccggcgctgcatggtgacgcccgttcggtcgggacccgccggtcggagttatgccgcgtccagggccatcggggcgctttttatcgggaggagcttatgggcgtggcgggcctcccagcccggtcgcgcgcctccccgacacgtgcgcccgcagggcggcggccccctcgtctcccatcagcagtttcctaaactgggacatgatgtccaccacgcggacccgcgggcccaacacggacccgccgcttacgggggcgggggggaagggctccaggtccttgagaagaaaggcggggtctgccgtcccggacacgggggcccggggcgctgaggaggcggggcgcagatccacgtgctccgcggccgcgcggacgtccgcccagaacttggcgggggtggtgcgcgcgtacaggggctgggtcgctcggaggacgcacgcgtagcgcaggggggtgtacgtgcccacctcgggggccgtgaatcccccgtcaaacgcggccagtgtcacgcacgccaccacggtgtcggcaaagcccagcagccgctgcaggacgagcccggcggccagaatggcgcgcgtggccgccgcgtcgtcccggcgccggtgcgcgtccccgcacgcccgggcgtactttaaggtcacggtcgccagggccgtgtgcagcgcgtacaccgcagcgcccagcacggcgttgagcccgctgttggcgagcagccggcgcgctgcggtgtcgcccagcgcctcgtgctcggcccccacgaccgcggggcttcccaggggcagggcgcgaaacagctcctcccgcgccacgtccgcaaaggcggggtggtgcacgtgcgggtgcaggcgcgcccccacgaccaccgagagccactggaccgtctgctccgccatcaccgccagcacatccagcacgcgccccaggaaggcggcctcccgcgtcaaaacgcaccggacggcgtcgggattgaagcgggcgagcagggccccggtggccaggtacgtcatgcggccggcatagcgggcggccacgcgacagtcgcggtccagcagcgcgcgcaccccgggccagtacagcagggaccccagcgagctgcggaacaccgcggcgtcggggccggattggggggacactaacccccccgcgctcagtaacggcacggccgcggccccgacgggacgcaacgccgtgaggctcgcgaactgccgcctcagctcggccgccctgtcgtccaggtcagacccgcgcgcctccgcgtgaaggcgcgtcccgcacacccacccgttgatggccagccgcacgacggcatccgccaaaaagctcatcgcctgggcggggctggtttttgttcgacgatccgtcaggtcaagaatcccatcgcccgtgatataccaggccaacgcctcgccctgctgcagggtttggcggaaaaacaccgcggggttgtcgggggaggcgaagtgcatgacccccacgcgcgataacccgaacgcgctatccggacacgggtaaaacccggccggatgccccagggctagggcggagcgcacggactcgtcccacacggcaacctgaggggccagtcgatccaacgggaatgccgcccggagctccgggcccggcacgcgtccctccagaacctccaccttgggcggggaacgggccccgccgccgtcctccggcccgacggcttccgggtagtcgtcctcctcgtactgcagctcctctaggaacagcggcgacggcgccacccgcgaaccgccgacccgccccaaaatagcccgcgcgtcgacgggacccaggtatcccccctgccgggcctgcggaggaccgcggggaacctcatcatcatcgtccaggcgaccgcgcaccgactggctacgggccgcatcgggcccggggcgctgccgggacgctcggcgatgggatgtgggcggggcttccgacgcgcgccgtcgtcgggctcgcgggccttcccgtcgacggcgcacgggcggctcgtcgcccgccatctcctccagagcctctagctcgctgtcgtcatccccgcggaacaccgcacgcaggtaccccatgaaccccaccccatcgcccgctggctcgtccgccacgggcgaggcgcgggggcgggtggatgcgcgcctcctgcgccccgcgggttcgcgagccgacatggtggcgatagacgcgggttatcggatgtccgctaccccccaaaaaagaaaaagaccccacagcgcggatggaggccggggtaggtgccgccggaccccctcgcgatgggaatggacgggagcgacggggccggcgcaaaaaaacgcagtatctcccgcgaaggctacccgccgccccagcccccggccaaatgcggaaacggtcccgcgctctcgcctttatacgcgggccgccctgcgacacaatcacccgtccgtggtttcgaatctacacgacaggcccgcagacgcggctaacacacacgccggcaacccagaccccagtgggttggttgcgcggtcccgtctcctggctagttctttcccccaccaccaaataatcagacgacaaccgcaggttttgtaatgtatgtgctcgtgtttattgtggatacgaaccggtgacgggaggggaaaacccagacgggggatgcgggtccggtcgcgccccctacccaccgtactcgtcaattccaagggcatcggtaaacatctgctcaaactcgaagtcggccatatccagagcgccgtagggggcggagtcgtggggggtaaatcccggccccggggaatccccgtcccccaacatgtccagatcgaaatcgtctagcgcgtcggcatgcgccatcgccacgtcctcgccgtctaagtggagctcgtcccccaggctgacatcggtcgggggggccgtcgacagtctgcgcgtgtgtcccgcggggagaaaggacaggcgcggagccgccagccccgcctcttcgggggcgtcgtcgtccgggagatcgagcaggccctcgatggtagacccgtaattgtttttcgtacgcgcgcggctgtacgcgtgttcccgcatgaccgcctcggagggcgaggtcgtgaagctggaatacgagtccaacttcgcccgaatcaacaccataaagtacccagaggcgcgggcctggttgccatgcagggtgggaggggtcgtcaacggcgcccctggctcctccgtagccgcgctgcgcaccagcgggaggttaaggtgctcgcgaatgtggtttagctcccgcagccggcgggcctcgattggcactccccggacggtgagcgctccgttgacgaacatgaagggctggaacagacccgccaactgacgccagctctccaggtcgcaacagaggcagtcaaacaggtcgggccgcatcatctgctcggcgtacgcggcccataggatctcgcgggtcaaaaatagatacaaatgcaaaaacaaaacacgcgccagacgagcggtctctcggtagtacctgtccgcgatcgtggcgcgcagcatttctcccaggtcgcgatcgcgtccgcgcatgtgcgcctggcggtgcagctgccggacgctggcgcgcaggtaccggtacagggccgagcagaagttggccaacacggttcgatagctctcctcccgcgcccgtagctcggcgtggaagaaacgagagagcgcttcgtagtagagcccgaggccgtcgcgggtggccggaagcgtagggaaggccacgtcgccgtgggcgcgaatgtcgatttgggtgcgttcggggacgtacgcgtccccccattccaccacatcgctgggcagcgttgataggaatttacactcccggtacaggtcggcgttggtcggtagcgccgaaaacagatcctcgttccaggtatcgagcatggtacatagcgcggggcccgcgctaaagcccaagtcgtcgaggagacggttaaagagggcggcgggggggacgggcatgggtggggagggcatgagctgggcctggctcaggcgccccgttgcgtacagcgggggggccgccggggtgtttttgggacccccggccgggcgggggggcggtggcgaagcgccgtccgcgttcatgtcggcaaacagctcgtcgaccaagaggtccattgggtggggttgatacgggaaagacgatatcgggcttttgatgcgatcgtccccgcccgcccagagagtgtgggacgcccgacggcgcgggaagagaaaacccccaaacgcgttagaggaccggacggaccttatggggggaagtgggcagcgggaaccccgtccgttcccgaggaatgacagcccgtggtcgccaccacgcatttaagcaacccgcacgggccgccccgtacctcgtgacttccccccacattggctcctgtcacgtgaaggcgaaccgagggcggctgtccaacccaccccccgccacccagtcccggtccccgtcggattgggaaacaaaggcacgcaacgccaacaccgaatgaacccctgttggtgctttattgtctgggtacggaagttttcactcgacgggccgtctggggcgagaagcggagcgggctggggctcgaggtcgctcggtggggcgcgacgccgcagaacgccctcgagtcgccgtggccgcgtcgacgtcctgcaccacgtctggattcaccaactcgttggcgcgctgaagcaggtttttgccctcgcagaccgtcacgcggatggtggtgatgccaaggagttcgttgaggtcttcgtctgtgcgcggacgcgacatgtcccagagctggaccgccgccatccgggcatgcatggccgccaggcgcccgaccgcggcgcagaagacgcgcttgttaaagccggccacccggggggtccatggcgcgtcggggtttgggggggcggtgctaaagtgcagctttctggccagcccctgcgcgggtgtcttggatcgggttggcgccgtcgacgcgggggcgtctgggagtgcggcggattctggctgggccgatttcctgccgcgggtggtctccgccgccggggccgcgggggccttagtcgccacccgctgggttcggggggcccggggggcggtggtgggtgtgcgtccggcccctccggacccagcgggtggcggaggcgcccgcgcaggccccgggccggacaaaaccgccccggaaacgggacgccgcgtccgggggacctccgggtgttcgtcgtcttcggatgacgagcccccgtagagggcataatccgactcgtcgtactggacgaaacggacctcgcccctctggcgcgagcgtgtctgtagggcgccacggcgggaggtgtcaggcggactatcgggactcgccatacctgaagacggggtgtagtacagatcctcgtactcatcgcgcggaacctcccgcggacccgacttcacggagcggcgagaggtcatggttccacgaacacgctagggtcggatgcgcggacaattaggcctgggttcggacggcgggggtggtgcaggtgtggagaggtcgagcgataggggcggcccgggagagaagagagggtccgcaaaacccactggggatgcgtgagtggccctctgtgggcggtgggggagagtcttataggaagtgcatataaccacaacccatgggtctaaccaatccccaggggccaagaaacagacacgccccaaacggtctcggtttccgcgaggaaggggaagtcctgggacaccctccacccccacccctcaccccacacagggcgggttcaggcgtgcccggcagccagtagcctctggcagatctgacagacgtgtgcgataatacacacgcccatcgaggccatgcctacataaaagggcaccagggcccccggggcagacatttggccagtgttttgggtctcgcaccgcgcgcccccgatcccatcgcgcccgccctcctcgccgggcggctccccgcgcgggcccgcgtctcccgccgctaaggcgacgagcaagacaaacaacaggcccgcccgacagacccttctgggggggcccatcgtccctaacaggaagatgagtcagtggggatccggggcgatccttgtccagccggacagcttgggtcgggggtacgatggcgactggcacacggccgtcgctactcgcgggggcggagtcgtgcaactgaacctggtcaacaggcgcgcggtggcttttatgccgaaggttagcggggactccggatgggccgtcgggcgcgtctctctggacctgcgaatggctatgccggctgacttttgcgcgattattcacgcccccgcgctagccagccccgggcaccacgtaatactgggtcttatcgactcggggtaccgcggaaccgttatggccgtggtcgtagcgcctaaaaggacgcgggaatttgcccccgggaccctgcgggtcgacgtgacgttcctggacatcctggcgacccccccggccctcaccgagccgatttccctgcggcagttcccgcaactggcgcccccccctccaaccggggccgggatacgcgaagatccttggttggagggggcgctcggggccccaagcgtgactacggccctaccggcgcgacgccgagggcggtccctcgtctatgccggcgagctgacgccggttcagacggaacacggggacggcgtacgagaagccatcgccttccttccaaaacgcgaggaggatgccggtttcgacattgtcgtccgtcgcccggtcaccgtcccggcaaacggcaccacggtcgtgcagccatccctccgcatgctccacgcggacgccgggcccgcggcctgctatgtgttggggcggtcgtcgctcaacgcccgcggcctcctggtcgttcctacgcgctggctccccgggcacgtatgtgcgtttgttgtttacaaccttacgggggttcctgtgaccctcgaggccggcgccaaggtcgcccagctcctggttgcgggggcggacgctcttccttggatccccccggacaactttcacgggaccaaagcgcttcgaaactaccccaggggtgttccggactcaaccgccgaacccaggaacccgccgctcctggtgtttacgaacgagtttgacgcggaggcccccccgagcgagcgcgggaccgggggttttggctctaccggtatttagcccacagctttgggttcgttccgggcaataaaaaacgtttgtatcgcatctttcctgtgtgtagttgtttatgttggatgcctgtgggtctatcacacccgcccctccatcccacaaacacaaaacacacgggttggatgaaaacacgcatttattgacccaaaacacacggagctgctcgagatgggccagggcgaggtgcggttggggaggctgtaggtctgggaacggacacgcggggacacgattccggtttggggtccgggagggcgtcgccgtttcgggcggcaggcgccagcgtaacctccgggggcggcgtgtgggggtgccccaaggagggcgcctcggtcaccccaatcccccccgaccgggttcccccggcaaccccgaaggcggagaggccaagggcccgttcggcgatggccacatcctccatgaccacgtcactctcggccatgctccgaatagcctgggagacgagcacatccgcggacttgtcagccgcccccacggacatgtacatctgcaggatggtggccatacacgtgtccgccaggcgccgcatcttgtcctgatgggccgccacggccccgtcgatcgtgggggcctcgagcccggggtggtggcgcgccagtcgttctaggttcaccatgcaggcgtggtacgtgcgggccaaggcgcgggccttcacgaggcgtcgggtgtcgtccagggaccccagggcgtcatcgagcgtgatgggggcgggaagtagcgcgttaacgaccgccagggcctcctgcagccgcggctccgcctccgagggcggaacggccgcgcggatcatctcatattgttcctcggggcgcgctccccagccacatatagccccgagaagagaagccatcgcgggcgggtactggcccttgggcgcgcggacgcaatggggcaggaagacgggaaccgcggggagaggcgggcggccgggactcccgtggaggtgaccgcgctttatgcgaccgacgggtgcgttattacctcttcgatcgccctcctcacaaactctctactgggggccgagccggtttatatattcagctacgacgcatacacgcacgatggccgtgccgacgggcccacggagcaagacaggttcgaagagagtcgggcgctctaccaagcgtcgggcgggctaaatggcgactccttccgagtaaccttttgtttattggggacggaagtgggtgggacccaccaggcccgcgggcgaacccgacccatgttcgtctgtcgcttcgagcgagcggacgacgtcgccgcgctacaggacgccctggcgcacgggaccccgctacaaccggaccacatcgccgccaccctggacgcggaggccacgttcgcgctgcatgcgaacatgatcctggctctcaccgtggccatcaacaacgccagcccccgcaccggacgcgacgccgccgcggcgcagtatgatcagggcgcgtccctacgctcgctcgtggggcgcacgtccctgggacaacgcggccttaccacgctatacgtccaccacgaggtgcgcgtgcttgccgcgtaccgcagggcgtattatggaagcgcgcagagtcccttctggtttcttagcaaattcgggccggacgaaaaaagcctggtgctcaccactcggtactacctgcttcaggcccagcgtctggggggcgcgggggccacgtacgacctgcaggccatcaaggacatctgcgccacctacgcgattccccacgccccccgccccgacaccgtcagcgctgcgtccctgacctcgtttgccgccatcacgcggttctgttgcacgagccagtacgcccgcggggccgcggcggccgggtttccgctttacgtggagcgccgtattgcggccgacgtccgcgagaccagtgcgctggagaagttcataacccacgatcgcagttgcctgcgcgtgtccgaccgtgaattcattacgtacatctacctggcccattttgagtgtttcagccccccgcgcctagccacgcatcttcgggccgtgacgacccacgaccccaaccccgcggccagcacggagcagccctcgcccctgggcagggaggccgtggaacaatttttttgtcacgtgcgcgcccaactgaatatcggggagtacgtcaaacacaacgtgaccccccgggagaccgtcctggatggcgatacggccaaggcctacctgcgcgctcgcacgtacgcgcccggggccctgacgcccgcccccgcgtattgcggggccgtggactccgccaccaaaatgatggggcgtttggcggacgccgaaaagctcctggtcccccgcgggtggcccgcgtttgcgcccgccagtcccggggaggacacggcgggcggcacgccgcccccacagacctgcggaattgtcaagcgcctcctgagactggccgccacggaacagcagggccccacacccccggcgatcgcggcgcttatccgtaatgcggcggtgcagactcccctgcccgtctaccggatatccatggtccccacgggacaggcatttgccgcgctggcctgggacgactgggcccgcataacgcgggacgctcgcctggccgaagcggtcgtgtccgccgaagcggcggcgcaccccgaccacggcgcgctgggcaggcggctcacggatcgcatccgcgcccagggccccgtgatgccccctggcggcctggatgccggggggcagatgtacgtgaatcgcaacgagatattcaacggcgcgctggcaatcacaaacatcatcctggatctcgacatcgccctgaaggagcccgtcccctttcgccggctccacgaggccctgggccactttaggcgcggggctctggctgcggttcagctcctgtttcccgcggcccgcgtggaccccgacgcatatccctgttattttttcaaaagcgcatgtcggcccggcccggcgtccgtgggttccggcagcggactcggcaacgacgacgacggggactggtttccctgctacgacgacgccggtgatgaggagtgggcggaggacccgggcgccatggacacatcccacgatcccccggacgacgaggttgcctactttgacctgtgccacgaagtcggccccacggcggaacctcgcgaaacggattcgcccgtgtgttcctgcaccgacaagatcggactgcgggtgtgcatgcccgtccccgccccgtacgtcgtccacggttctctaacgatgcggggggtggcacgggtcatccagcaggcggtgctgttggaccgagattttgtggaggccatcgggagctacgtaaaaaacttcctgttgatcgatacgggggtgtacgcccacggccacagcctgcgcttgccgtattttgccaaaatcgcccccgacgggcctgcgtgcggaaggctgctgccagtgtttgtgatcccccccgcctgcaaagacgttccggcgtttgtcgccgcgcacgccgacccgcggcgcttccattttcacgccccgcccacctatctcgcttccccccgggagatccgtgtcctgcacagcctgggtggggactatgtgagcttctttgaaaggaaggcgtcccgcaacgcgctggaacactttgggcgacgcgagaccctgacggaggtcctgggtcggtacaacgtacagccggatgcgggggggaccgtcgaggggttcgcatcggaactgctggggcggatagtcgcgtgcatcgaaacccactttcccgaacacgccggcgaatatcaggccgtatccgtccggcgggccgtcagtaaggacgactgggtcctcctacagctagtccccgttcgcggtaccctgcagcaaagcctgtcgtgtctgcgctttaagcacggccgggcgagtcgcgccacggcgcggacattcgtcgcgctgagcgtcggggccaacaaccgcctgtgcgtgtccttgtgtcagcagtgctttgccgccaaatgcgacagcaaccgcctgcacacgctgtttaccattgacgccggcacgccatgctcgccgtccgttccctgcagcacctctcaaccgtcgtcttgataacggcgtacggcctcgtgctcgtgtggtacaccgtcttcggtgccagtccgctgcaccgatgtatttacgcggtacgccccaccggcaccaacaacgacaccgccctcgtgtggatgaaaatgaaccagaccctattgtttctgggggccccgacgcacccccccaacgggggctggcgcaaccacgcccatatctgctacgccaatcttatcgcgggtagggtcgtgcccttccaggtcccacctgacgccatgaatcgtcggatcatgaacgtccacgaggcagttaactgtctggagaccctatggtacacacgggtgcgtctggtggtcgtagggtggttcctgtatctggcgttcgtcgccctccaccaacgccgatgtatgtttggcgtcgtgagtcccgcccacaagatggtggccccggccacctacctcttgaactacgcaggccgcatcgtatcgagcgtgttcctgcagtacccctacacgaaaattacccgcctgctctgcgagctgtcggtccagcggcaaaacctggttcagttgtttgagacggacccggtcaccttcttgtaccaccgccccgccatcggggtcatcgtaggctgcgagttgatgctacgctttgtggccgtgggtctcatcgtcggcaccgctttcatatcccggggggcatgtgcgatcacataccccctgtttctgaccatcaccacctggtgttttgtctccaccatcggcctgacagagctgtattgtattctgcggcggggcccggcccccaagaacgcagacaaggccgccgccccggggcgatccaaggggctgtcgggcgtctgcgggcgctgctgttccatcatcctctcgggcatcgcagtgcgattgtgttatatcgccgtggtggccggggtggtgctcgtggcgcttcactacgagcaggagatccagaggcgcctgtttgatgtatgacgtcacatccaggccggcggaaaccgtaacggcatatgcaaattggaaactgtcctgtcttggggcccacccacccgacgcgtcatatgcaaatgaaaatcggtcccccgaggccacgtgtagcctggatcccaacgaccccgcccatgggtcccaattggccgtcccgttaccaagaccaacccagccagcgtatccacccccgcccgggtccccgcggaagcggaacggggtatgtgatatgctaattaaatacatgccacgtacttatggtgtctgattggtccttgtctgtgccggaggtggggcgggggccccgcccggggggcggaacgaggaggggtttgggagagccggccccggcaccacgggtataaggacatccaccacccggccggtggtggtgtgcagccgtgttccaaccacggtcacgcttcggtgcctctccccgattcgggcccggtcgctcgctaccggtgcgccaccaccagaggccatatccgacaccccagccccgacggcagccgacagcccggtcatggcgactgacattgatatgctaattgacctcggcctggacctctccgacagcgatctggacgaggacccccccgagccggcggagagccgccgcgacgacctggaatcggacagcagcggggagtgttcctcgtcggacgaggacatggaagacccccacggagaggacggaccggagccgatactcgacgccgctcgcccggcggtccgcccgtctcgtccagaagaccccggcgtacccagcacccagacgcctcgtccgacggagcggcagggccccaacgatcctcaaccagcgccccacagtgtgtggtcgcgcctcggggcccggcgaccgtcttgctcccccgagcagcacgggggcaaggtggcccgcctccaacccccaccgaccaaagcccagcctgcccgcggcggacgccgtgggcgtcgcaggggtcggggtcgcggtggtcccggggctgccgatggtttgtcggacccccgccggcgtgcccccagaaccaatcgcaaccctgggggaccccgccccggggcggggtggacggacggccccggcgccccccatggcgaggcgtggcgcggcagtgagcagcccgacccacccggaggccagcggacacggggcgtgcgccaagcaccccccccgctaatgacgctggcgattgcccccccgcccgcggacccccgcgccccggccccggagcgaaaggcgcccgccgccgacaccatcgacgccaccacgcggttggtcctgcgctccatctccgagcgcgcggcggtcgaccgcatcagcgagagctttggccgcagcgcacaggtcatgcacgacccctttggggggcagccgtttcccgccgcgaatagcccctgggccccggtgctggcgggccaaggagggccctttgacgccgagaccagacgggtctcctgggaaaccttggtcgcccacggcccgagcctctatcgcacttttgccggcaatcctcgggccgcatcgaccgccaaggccatgcgcgactgcgtgctgcgccaagaaaatttcatcgaggcgctggcctccgccgacgagacgctggcgtggtgcaagatgtgcatccaccacaacctgccgctgcgcccccaggaccccattatcgggacggccgcggctgtgctggataacctcgccacgcgcctgcggccctttctccagtgctacctgaaggcgcgaggcctgtgcggcctggacgaactgtgttcgcggcggcgtctggcggacattaaggacattgcatccttcgtgtttgtcattctggccaggctcgccaaccgcgtcgagcgtggcgtcgcggagatcgactacgcgacccttggtgtcggggtcggagagaagatgcatttctacctccccggggcctgcatggcgggcctgatcgaaatcctagacacgcaccgccaggagtgttcgagtcgtgtctgcgagttgacggccagtcacatcgtcgcccccccgtacgtgcacggcaaatatttttattgcaactccctgttttaggtacaataaaaacaaaacatttcaaacaaatcgcccctcgtgttgtccttctttgctcatggccggcggggcgtgggtcacggcagatggcgggggtgggcccggcgtacggcctgggtgggcggagggaactaacccaacgtataaatccgtccccgttccaaggccggtgtcatagtgcccttaggagcttcccgcccgggcgcatccccccttttgcactatgacagcgacccccctcaccaacctgttcttacgggccccggacataacccacgtggcccccccttactgcctcaacgccacctggcaggccgaaacggccatgcacaccagcaaaacggactccgcttgcgtggccgtgcggagttacctggtccgcgcctcctgtgagaccagcggcacaatccactgctttttctttgcggtatacaaggacacccaccacacccctccgctgattaccgagctccgcaactttgcggacctggttaaccacccgccggtcctacgcgaactggaggataagcgcggggtgcggctgcggtgtgcgcggccgtttagcgtcgggacgattaaggacgtctctgggtccggcgcgtcctcggcgggagagtacacgataaacgggatcgtgtaccactgccactgtcggtatccgttctcaaaaacatgctggatgggggcctccgcggccctacagcacctgcgctccatcagctccagcggcatggccgcccgcgcggcagagcatcgacgcgtcaagattaaaattaaggcgtgatctccaacccccccatgaatgtgtgtaaccccccccaaaaaaataaagagccgtaacccaaccaaaccaggcgtggtgtgagtttgtggacccaaagccctcagagacaacgcgacaggccagtatggaccgtgatacttttatttattaactcacaggggcgcttaccgccacaggaataccagaataatgaccaccacaatcgcgaccaccccaaatacagcatggcgccacaccacgccacaacagccctgtcgccggtatggggcatgatcagacgagccgcgcgccgcgcgttgggccctgtacagctcgcgcgaattgaccctaggaggccgccacgcgcccgagttttgcgttcgtcgctggtcgtcgggcgccaaagccccggacggctgttcggtcgaacgaacggccacgacagtggcataggttggggggtggtccgacatagcctcggcgtacgtcgggaggcccgacaagaggtcccttgtgatgtcgggtggggccacaagcctggtttccggaagaaacaggggggttgccaataacccgccagggccaaaactccggcgctgcgcacgtcgttcggcgcggcgccgggcgcgccgagcggctcgctgggcggcttggcgtgagcggccccgctccgacgcctcgccctctccggaggaggttggcggaattggcacggacaacaggggcccagcagagtacggtggaggtgggtccgtgggggtgtccagatcaataacgacaaacggcccctcgttcctaccagacaagctatcgtaggggggcgggggatcagcaaacgcgttccccgcgctccataaacccgcgtcgggttgcgccgcctccgaagccatggatgcgccccaaagccacgactcccgcgcgctaggtccttggggtaatggaaaaggccctactccccatccaagccagccaagttaacgggctacgccttcgggaatgggactggcaccccggcggattttgttgggctggcatgcgtcgcccaaccgagggccgcgtccacgggacgcgccttttataaccccgggggtcattcccaacgatcacatgcaatctaactggctcccctctccccccctctcccctctccccccctctcccctctccccccctctcccctctccccccctctcccctctccccccctctcccctctccccccctctcccctctccccccctctcccctctccccccctctcccctctccccccctctcccctctccccccctctcccctctcccctctgctctttccccgtgacacccgacgctgggggcgtggctgccgggaggggccgcggatgggcgggcctacttggtctcccgccccccccccccccccccgaaccgccccgccggctttgcccccctttgatcccctgctacccccaacccgtgctggtggtgcgggttggggggggatgtgggcgggggtgcgcgggaggtgtcggtggtggtggtggtggtggtagtaggaatggtggtgagggggggggggcgctggttggtcaaaaaagggagggacgggggccggcagaccgacggcgacaacgctccccggcggccgggtcgcggctcttacgagcggcccggcccgcgctcccaccccccgggccgtgtccttgctttccccccgtctcccccccccccgccttctcctcctcctcctcgtttttccaaaccccgcccacccggcccggcccggcccggcccggcccggccaccgccgcccacccacccacctcgggatacccagccccggtcccccgttccccgggggccgttatctccagcgccccgtccggcgcgccgccccccgccgctaaaccccatcccgcccccgggaccccacatataagcccccagccacacgcaagaacagacacgcagaacggctgtgtttatttaaataaaccaatgtcggaataaacaaacacaaacacccgcgacggggggacggaggggacggagggagggggtgacgggggacgggaacagacacaaaaacaaccacaaaaaacaaccacccaccgacacccccaccccagtctcctcgccttctcccacccaccccacgcccccactgagcccggtcgatcgacgagcacccccgcccacgcccccgcccctgccccggcgacccccggcccgcacgatcccgacaacaataacaaccccaacggaaagcggcggggtgttgggggaggcgaggaacaaccgaggggaacgggggatggaaggacgggaagtggaagtcctgatacccatcctacacccccctgccttccaccctccggccccccgcgagtccacccgccggccggctaccgagaccgaacacggcggccgccgcagccgccgcagccgccgccgacaccgcagagccggcgcgcgcactcacaagcggcagaggcagaaaggcccagagtcattgtttatgtggccgcgggccagcagacggcccgcgacaccccccccccgcccgtgtgggtatccggccccccgccccgcgccggtccattaagggcgcgcgtgcccgcgagatatcaatccgttaagtgctctgcagacaggggcaccgcgcccggaaatccattaggccgcagacgaggaaaataaaattacatcacctacccacgtggtgctgtggcctgtttttgctgcgtcatctcagcctttataaaagcgggggcgcggccgtgccgatcgcgggtggtgcgaaagactttccgggcgcgtccgggtgccgcggctctccgggcccccctgcagccggggcggccaaggggcgtcggcgacatcctccccctaagcgccggccggccgctggtctgttttttcgttttccccgtttcgggggtggtgggggttgcggtttctgtttctttaacccgtctggggtgtttttcgttccgtcgccggaatgtttcgttcgtctgtcccctcacggggcgaaggccgcgtacggcccgggacgaggggcccccgaccgcggcggtccgggccccgtccggacccgctcgccggcacgcgacgcgaaaaaggccccccggaggcttttccgggttcccggcccggggcctgagatgaacactcggggttaccgccaacggccggcccccgtggcggcccggcccggggccccggcggacccaaggggccccggcccggggccccacaacggcccggcgcatgcgctgtggtttttttttcctcggtgttctgccgggctccatcgcctttcctgttctcgcttctccccccccccttcttcacccccagtaccctcctccctcccttcctcccccgttatcccactcgtcgagggcgccccggtgtcgttcaacaaagacgccgcgtttccaggtaggttagacacctgcttctccccaatagaggggggggacccaaacgacagggggcgccccagaggctaaggtcggccacgccactcgcgggtgggctcgtgttacagcacaccagcccgttcttttccccccctcccacccttagtcagactctgttacttacccgtccgaccaccaactgcccccttatctaagggccggctggaagaccgccagggggtcggccggtgtcgctgtaaccccccacgccaatgacccacgtactccaagaaggcatgtgtcccaccccgcctgtgtttttgtgcctggctctctatgcttgggtcttactgcctggggggggggagtgcgggggagggggggtgtggaaggaaatgcacggcgcgtgtgtaccccccctaaagttgttcctaaagcgaggatacggaggagtggcgggtgccgggggaccggggtgatctctggcacgcgggggtgggaagggtcgggggagggggggatggagtaccggcccacctggccggcgcgggtgcgcgtgcctttgcacaccaaccccacgtcccccggcggtctctaagaagcaccgccccccctccttcataccaccgagcatgcctgggtgtgggttggtaaccaacacgcccatcccctcgtctcctgtgattctctggctgcaccgcattcttgttttctaactatgttcctgtttctgtctcccccccccccacccctccgccccaccccccaacacccacgtctgtggtgtggccgacccccttttgggcgccccgtcccgccccgccacccctcccatcctttgttgccctatagtgtagttaaccccccccgccctttgtggcggccagaggccaggtcagtccgggcgggcaggcgctcgcggaaacttaacacccacacccaacccactgtggttctggctccatgccagtggcaggatgctttcggggatcggtggtcaggcagcccgggccgcggctctgtggttaacaccagagcctgcccaacatggcacccccactcccacgcacccccactcccacgcacccccactcccacgcacccccactcccacgcacccccactcccacgcacccccactcccacgcacccccactcccacgcacccccactcccacgcacccccactcccacgcatccccgcgatacatccaacacagacagggaaaagatacaaaagtaaacctttatttcccaacagacagcaaaaatcccctgagtttttttttattagggccaacacaaaagacccgctggtgtgtggtgcccgtgtctttcacttttcccctccccgacacggattggctggtgtagtgggcgcggccagagaccacccagcgcccgacccccccctccccacaaacacggggggcgtcccttattgttttccctcgtcccgggtcgacgccccctgctccccggaccacgggtgccgagaccgcaggctgcggaagtccagggcgcccactagggtgccctggtcgaacagcatgttccccacgggggtcatccagaggctgttccactccgacgcgggggccgtcgggtactcggggggcatcacgtggttacccgcggtctcggggagcagggtgcggcggctccagccggggaccgcggcccgcagccgggtcgccatgtttcccgtctggtccaccaggaccacgtacgccccgatgttccccgtctccatgtccaggatgggcaggcagtcccccgtgatagtcttgttcacgtaaggcgacagggcgaccacgctagagacccccgagatgggcaggtagcgcgtgaggccgcccgcggggacggccccggaagtctccgcgtggcgcgtcttccgggcacacttcctcggcccccgcggcccagaagcagcgcgggggccgagggaggtttcctcttgtctccctcccagggcaccgacggccccgcccgaggaggcggaagcggaggaggacgcggccccggcggcggaagaggcggcccccgcgggggtcggggccgaggaggaagaggcagaggaggaagaggcggaggccgccgaggacgtcaggggggtcccgggcccaccctggccgcgcccccccggccctgagtcggagggggggtgcgtcgccgccctcttggcccctgccggcgcgagggggggacgcgtggactggggggaggggttttcctggcccgacccgcgcctcttcctcggacgcaccgccgcctcctgctcgacagaggcggcggaggggagcggggcggcgccggagggggcggcgccgcgggagggcccgtgcccaccctccacgcccggcccccccgagccgcgcgccaccgtcgcacgcgcccggcacagactctgttcttggttcgcggcctgagccagggacgagtgcgactggggcacacggcgcgcgtccgcggggcgggcggccggctccgccccgggggccggggcgcgggggccgggccccggaggcggcgctcgcacgcacggggccacggccgcgcgggggcgcgcgggtcccgacgcggccgcggacgcggggggcccggggcggggggcggagcctggcatgggcgccgcggggggcctgtggggagaggccgggggggagtcgctgatcactatggggtctctgttgtttgcaaggggggcgggtctgttgacaagggggcccgtccggcccctcggccgccccgcctccgcttcaacaaccccaaccccaaccccaacccccccggaggggccagacgccccccgcggcgccgcggctcgcgactggcgggagccgccgccgccgctgctgttggtggtggtgttggtgttactgctgccgtgtggcccgatgggcgccgaggggggcgctgtccgagccgcggccggctggggggctgcgtgagacgccccgcccgtcacggggggcgcggcggcgcctctgcgtgggggggcgcggggcgtccggcggggggcgggcggtacgtagtctgctgcaagagacaacggggggcgcgatcaggttacgccccctccccggcccgccctttcctcgcccgcccgcctattcctccctccccccccctcctcctcctcctcccccagggtccttgccgccccccgcctcacaaaataatgctttatttgtgaaatttgtgatgctattgctttatttcactcctggactggctcccagcagtcaaaggggatgacaagcagaaagtccttcaggttctctttgaaactttcaaaggtgataatctgggttgcacaggaagtttccggggttggagggcagtgctgcttgtagtggctggccatcatggtcaaggggcccttgagcttggtgaggctgccccgcaggccctgcttgtacagctccaggcgggtctgtaggcaggtcggctcctggaggtcaaacatttctgagatgacttctactgtttcattcatctcagcagcagtgtctctactcaggttcaggagacgccgggcctcctggatggcattcacatgctcccagggctgcgtgctggggctgggcgagcgggcgggtgcagagatgctgcaggccacagtgcccaagagcagcaggctctgcagccacatcgatctgacggttcactaaacgagctctgcttatatagacctcccaccgtacacgcctaccgcccatttgcgtcaatggggcggagttgttacgacattttggaaagtcccgttgattttggtgccaaaacaaactcccattgacgtcaatggggtggagacttggaaatccccgtgagtcaaaccgctatccacgcccattgatgtactgccaaaaccgcatcaccatggtaatagcgatgactaatacgtagatgtactgccaagtaggaaagtcccataaggtcatgtactgggcataatgccaggcgggccatttaccgtcattgacgtcaatagggggcgtacttggcatatgatacacttgatgtactgccaagtgggcagtttaccgtaaatactccacccattgacgtcaatggaaagtccctattggcgttactatgggaacatacgtcattattgacgtcaatgggcgggggtcgttgggcggtcagccaggcgggccatttaccgtaagttatgtaacgcggaactccatatatgggctatgaactaatgaccccgtaattgattactattaataactgggggtcgtatgcggctggagggtcgcggacggagggtccctgggggtcgcaacgtaggcggggcttctgtggtgatgcggagagggggcggcccgagtctgcctggctgctgcgtctcgctccgagtgccgaggtgcaaatgcgaccagactgtcgggccagggctaacttataccccacgcctttcccctccccaaaggggcggcagtgacgattcccccaatggccgcgcgtcccaggggaggcaggcccaccgcggggcggccccgtccccggggaccaacccggcgcccccaaagaatatcattagcatgcacggcccggcccccgatttgggggcccaacccggtgtcccccaaagaaccccattagcatgcccctcccgccgacgcaacaggggcttggcctgcgtcggtgccccggggcttcccgccttcccgaagaaactcattaccatacccggaaccccaggggaccaatgcgggttcattgagcgacccgcgggccaatgcgcgaggggccgtgtgttccgccaaaaaagcaattagcataacccggaaccccaggggagtggttacgcgcggcgcgggaggcggggaataccggggttgcccattaagggccgcgggaattgccggaagcgggaagggcggccggggccgcccattaatgagtttctaattaccataccgggaagcggaacaaggcctcttgcaagtttttaattaccataccgggaagtgggcggcccggcccattgggcggtaactcccgcccaatgggccgggccccgaagactcggcggacgctggttggccgggccccgccgcgctggcggccgccgattggccagtcccgcccccgaggcgggcccgccctgtgagggcgggctggctccaagcgtatatatgcgcggctcctgccatcgtctctccggagagcggcttggtgcggagctcccgggagctccgcggaagacccaggccgcctcgggtgtaacgttagaccgagttcgccgggccggctccgcgggccagggcccgggcacgggcctcgggccccaggcacggcccgatgaccgcctcggcctccgccacccggcgccggaaccgagcccggtcggcccgctcgcgggcccacgagccgcggcgcgccaggcgggcggccgaggcccagaccaccaggtggcgcacccggacgtggggcgagaagcgcacccgcgcgggggtcgcgggggtcgcgggggtcgcgggggtcgcgggggtcgcggggggctccggcgccccctccccgcccgcgcgtcgcaggcgcaggcgcgccaggtgctccgcggtgacgcgcaggcggagggcgaggcgcggcggaaggcggaaggggcgcgagggggggtgggaggggtcagccccgccccccgggcccacgccgggcggtgggggccggggccggggggcggcggcggtgggccgggcctctggcgccggctcgggcggggggctgtccggccagtcgtcgtcatcgtcgtcgtcggacgcggactcgggaacgtggagccactggcgcagcagcagcgaacaagaaggcgggggcccaccggcggggggcggcggcggggcggccgcgggcgcgctcctgaccgcgggttccgagttgggcgtggaggttacctgggactgtgcggttgggacggcgcccgtgggcccgggcggccgggggcggcgggggccgcgatggcggcggcggcgggccatggagacagagagcgtgccggggtggtagagtttgacaggcaagcatgtgcgtgcagaggcgagtagtgcttgcctgtctaactcgctagtctcggccgcggggggcccgggctgcccgccgccgccgctttaaagggccgcgcgcgacccccggggggtgtgttttggggggggcccgttttcggggtctggccgctcctccccccgctcctccccccgctcctccccccgctcctccccccgctcctccccccgctcctccccccgctcctccccccgctcctccccccgctcctccccccgctcctccccccgctcctccccccgctcctccccccgctcctccccccgctcctccccccgctcctccccccgctcctccccccgctcctccccccgctcctccccccgctcccgcggccccgccccccacgcccgccgcgcgcgcgcacgccgcccggaccgccgcccgccttttttgcgcgcgcgcgcgcccgcggggggcccgggctgccacaggtgaaaccaacagagcacggcgcactccgcacgtcacacgtcacgtcatccaccacacctgcccaacaacacaactcacagcgacaactcaccgcgcaacaactcctgttcctcatccacacgtcaccgcgcacctcccgctcctccagacgtaccccggcgcaacacaccgctcctgctacacaccaccgcccctccccagccccagccctccccggccccagccctccccggccccagccctccccggccccagccctccccggccccagccctccccggccccagccctccccggccccagccctccccggccccagccctccccggccgcgtcccgcgctccctcgggggggttcgggcatctctacctcagtgccgccaatctcaggtcagagatccaaaccctccgggggcgcccgcgcaccaccaccgcccctcgccccctcccgcccctcgccccctcccgcccctcgccccctcccgcccctcgccccctcccgcccctcgccccctcccgcccctcgccccctcccgcccctcgccccctcccgcccctcgccccctcccgcccctcgccccctcccgcccctcgccccctcccgcccctcgccccctcccgcccctcgccccctcccgcccctcgccccctcccgcccctcgccccctcccgcccctcgccccctcccgcccctcgccccctcccgcccctcgccccctcccgcccctcgccccctcccgcccctcgccccctcccgcccctcgaataaacaacgctactgcaaaacttaatcaggttgttgccgtttattgcgtcttcgggtctcacaagcgccccgccccgtcccggcccgttacagcaccccgtccccctcgaacgcgccgccgtcgtcttcgtcccaggcgccttcccagtccacaacttcccgccgcgggggcgtggccaagcccgcctccgcccccagcacctccacggcccccgccgccgccagcacggtgccgctgcggcccgtggccgaggcccagcgaatcccgggcggcgccggcggcagggcccccgggccgtcgtcgtcgccgcgcagcaccagcgggggggcgtcgtcgtcgggctccagcagggcgcgggcgcaaaagtccctccgcggcccgcgccaccgggccgggccggcgcgcaccgcctcgcgccccagcgccacgtacacgggccgcagcggcgcgcccaggccccagcgcgcgcaggcgcggtgcgagtgggcctcctcctcgcagaagtccggcgcgccgggcgccatggcgtcggtggtccccgaggccgccgcccggccgtccagcgccggcagcacggcccggcggtactcgcgcggggacatgggcaccggcgtgtccgggccgaagcgcgtgcgcacgcggtagcgcacgttgccgccgcggcacaggcgcagcggcggcgcgtcggggtacaggcgcgcgtgcgcggcctccacgcgcgcgaagacccccgggccgaacacgcggcccgaggccagcaccgtgcggcgcaggtcccgcgccgccggccagcgcacggcgcactgcacggcgggcagcagctcgcacgccaggtaggcgtgctgccgcgacaccgcgggcccgtcggcgggccagtcgcaggcgcgcacggtgttgaccacgatgagccgccggtcgccggcgctggcgagcagccccagaaactccacggccccggcgaaggccaggtcccgcgtggacagcagcagcacgccctgtgcgcccagcgccgacacgtcgggggcgccggtccagttgcccgcccaggcggccgtgtccggcccgcacagccggttggccagggccgccagcaggcaggacagcccgccgcgctcggcggaccactccggcggcccccccgaggccccgccgccggccaggtcctcgcccggcagcggcgagtacagcaccaccacgcgcacgtcctcggggtcggggatctggcgcatccaggccgccatgcggcgcagcgggcccgaggcgcgcagggggccaaagaggcggcccccggcggccccgtgggggtgggggttatcgtcgtcgtcgccgccgccgcacgcggcctgggcggcgggggcgggcccggcgcaccgcgcggcgatcgaggccagggcccgcgggtcaaacatgagggccggtcgccaggggacggggaacagcgggtggtccgtgagctcggccacggcgcgcggggagcagtaggcctccagggcggcggccgcgggcgccgccgtgtggctgggccccgggggctgccgccgccagccgcccagggggtcggggccctcggcgggccggcgcgacagcgccacggggcgcgggcgggcctgcgccgcggcggcccggggcgccgcgggctgggcgggggcgggctcgggccccgggggcgtggaggggggcgcgggcgcggggaggggggcgcgggcgtccgagccgggggcgtccgcgccgctcttcttcgtcttcgggggtcgcgggccgccgcctccgggcggccgggccgggccgggactcttgcgcttgcgcccctcccgcggcgcggcggaggcggcggcggccgccagcgcgtcggcggcgtccggtgcgctggccgccgccgccagcagggggcgcaggctctggttgtcaaacagcaggtccgcggcggcggcggccgcggagctcggcaggcgcgggtcccgcggcagcgcggggcccagggccccggcgaccaggctcacggcgcgcacggcggccacggcggcctcgctgccgccggccacgcgcaggtccccgcgcaggcgcatgagcaccagcgcgtcgcgcacgaaccgcagctcgcgcagccacgcgcgcaggcggggcgcgtcggcgtgcggcggcggcggggaagcggggcccgcgggtccctccggccgcggggggctggcgggccgggccccggccagccccgggacggccgccaggtcgccgtcgaagccctcggccagcgcctccaggatcccgcggcaggcggccaggcactcgacggccacgcggccggcctgggcgcggcgcccggcgtcgtcgtcggcgtcggcgtggcgggcggcgtcggggtcgtcgccccccgcgggggaggcgggcgcggcggacagccgccccagggcggcgaggatccccgcggcgccgtacccggcgggcaccgcgcgctcgcccggtgcggcggcggcgacggcggcgaccccctcgtcatctgcgccggcgccggggctccccgcggcccccgtcagcgccgcgttctcgcgcgccaacaggggcgcgtaggcgcggcgcaggctggtcagcaggaagcccttctgcgcgcggtcgtatcggcggctcatggccacggcggccgccgcgtgcgccaggccccagccgaagcggccggccgccatggcgtagcccaggtggggcacggcccgcgccacgctgccggtgatgaaggagctgctgttgcgcgcggcgcccgagatccggaagcaggcctggtccagcgccacgtccccggggaccacgcgcgggttctggagccaccccatggcctccgcgtccggggtgtacagcagccgcgtgatcagggcgtactgctgcgcggcgtcgcccagctcgggcgcccacacggccgccggggcgcccgaggcctcgaaccggcgtcgcgcctcctccgcctcgggcgccccccagaggcccgggcggctgtcgcccaggccgccgtacagcacccgccccgggggcgggggcccggcgccgggccacggctccccgctgacgtacccgtcgcgatagcgcgcgtagaaggcgccggaggccgcgtcggcgtccagctcgacccgccggggctgcccggccgtgaagcggcccgtggcgtcgcggccggccaccgccgcgcgggcccggcggcgctcgatgcggcccgcggaggccgcgggggtcctcgccgccgcccggggcttgggcgcggcctcggagagggggggtggcccgggcgggggcggcgtccgcccgggggctgccggcgccgcgctcgacggaccccgcccgacggcccgcgcctcgcgtgcgtggtcggccgcgtcgttgccgtcgtcgtcctcgtcctcgtcggacgacgaggacgaagaggatgcggacgacgaggacgaggacccggagtccgacgaggtcgatgacgccgatggccgccaccggccgtgacgacgtctccgcggcggctgggccggcgggcgcggcgacaggcggtccgtggggtccggatacgcgccgcgtagcggggcctcccgttcgcggccccgggccggggcccggtcgccggcggcgtcggctgcgtcgtcgtactcgtccccgtcatcgtcgtcggctcgaaaggcgggggtccggggcggcgaggccgcggggtcgggcgtcgggatcgtccggacggcctcctctaccatggaggccagcagagccagctgtcgcggcgagacggcgtccccggcgtcctcgccggcgtcggtgcccgccgcgggggccctcccgtcccgccgggcgtcgtcgaggtcgtgggggtggtcggggtcgtggtcggggtcgtccccgccctcctccgtctccgcgccccacccgagggccccccgctcgtcgcggtctgggctcggggtgggcggcggcccgtcggtggggcccggggagccggggcgctgcttgttctccgacgccatcgccgatgcggggcgatcctccggggatacggctgcgacggcggacgtagcacggtaggtcacctacggactctcgatggggggagggggcgagacccacggaccccgacgacccccgccgtcgacgcggaactagcgcggaccggtcgatgcttgggtgggaaaaaggacagggacggccgatccccctcccgcgcttcgtccgcgtatcggcgtcccggcgcggcgagcgtctgacggtctgtctctggcggtcccgcgtcgggtcgtggatccgtgtcggcagccgcgctccgtgtggacgatcggggcgtcctcgggctcatatagtcccaggggccggcgggaaggaggagcagcggaggccgccggccccccgcccccccggcgggcccaccccgaacggaattccattatgcacgaccccgccccgacgccggcacgccgggggcccgtggccgcggcccgttggtcgaacccccggccccgcccatccgcgccatctgccatgggcggggcgcgagggcgggtgggtccgcgccccgccccgcatggcatctcattaccgcccgatccggcggtttccgcttccgttccgcatgctaacgaggaacgggcagggggcggggcccgggccccgacttcccggttcggcggtaatgagatacgagccccgcgcgcccgttggccgtccccgggccccccggtcccgcccgccggacgccgggaccaacgggacggcgggcggcccaagggccgcccgccttgccgcccccccattggccggcgggcgggaccgccccaagggggcggggccgccgggtaaaagaagtgagaacgcgaagcgttcgcacttcgtcccaatatatatatattattagggcgaagtgcgagcactggcgccgtgcccgactccgcgccggccccgggggcgggcccgggcggcggggggcgggtctctccggcgcacataaaggcccggcgcgaccgacgcccgcagacggcgccggccacgaacgacgggagcggctgcggagcacgcggaccgggagcgggagtcgcagagggccgtcggagcggacggcgtcggcatcgcgacgccccggctcgggatcgggatcgcatcggaaagggacacgcggacgcgggggggaaagacccgcccaccccacccacgaaacacaggggacgcaccccgggggcctccgacgacagaaacccaccggtccgccttttttgcacgggtaagcaccttgggtgggcggaggagggggggacgcgggggcggaggaggggggacgcgggggcggaggaggggggacgcgggggcggaggaggggggacgcgggggcggaggaggggggacgcgggggcggaggagggggctcacccgcgttcgtgccttcccgcaggaggaacgtcctcgtcgaggcgaccggcggcgaccgttgcgtggaccgcttcctgctcgtcgggcggggggaagccactgtggtcctccgggacgttttctggatggccgacatttccccaggcgcttttgcgccttgtgtaaaagcgcggcgtcccgctctccgatccccgcccctgggcacgcgcaagcgcaagcgcccttcccgccccctctcatcggagtctgaggtagaatccgatacagccttggagtctgaggtcgaatccgagacagcatcggattcgaccgagtctggggaccaggatgaagccccccgcatcggtggccgtagggccccccggaggcttggggggcggttttttctggacatgtcggcggaatccaccacggggacggaaacggatgcgtcggtgtcggacgaccccgacgacacgtccgactggtcttatgacgacattcccccacgacccaagcgggcccgggtaaacctgcggctcacgagctctcccgatcggcgggatggggttatttttcctaagatggggcgggtccggtctacccgggaaacgcagccccgggcccccaccccgtcggccccaagcccaaatgcaatgctacggcgctcggtgcgccaggcccagaggcggagcagcgcacgatggacccccgacctgggctacatgcgccagtgtatcaatcagctgtttcgggtcctgcgggtcgcccgggacccccacggcagtgccaaccgcctgcgccacctgatacgcgactgttacctgatgggatactgccgagcccgtctggccccgcgcacgtggtgccgtttgctgcaggtgtccggcggaacctggggcatgcacctgcgcaacaccatacgggaggtggaggctcgattcgacgccaccgcggaacccgtgtgcaagcttccttgtttggagaccagacggtacggcccggagtgtgatcttagtaatctcgagattcatctcagcgcgacaagcgatgatgaaatctccgatgccaccgatctggaggccgccggttcggaccacacgctcgcgtcccagtccgacacggaggatgccccctcccccgttacgctggaaaccccagaaccccgcgggtccctcgctgtgcgtctggaggatgagtttggggagtttgactggaccccccaggagggctcccagccctggctgtctgcggtcgtggccgataccagctccgtggaacgcccgggcccatccgattctggggcgggtcgcgccgcagaagaccgcaagtgtctggacggctgccggaaaatgcgcttctccaccgcctgcccctatccgtgcagcgacacgtttctccggccgtgagtccggtcgccccgacccccttgtatgtccccaaaataaaagaccaaaatcaaagcgtttgtcccagcgtcttaatggcgggaagggcggagagaaacagaccacgcggacatggggggtgtttgggggtttattggcaccgggggctaaagggtggtaaccggatagcagatgtgaggaagtcggggccgttcgccgcgaacggcgatcagagggtcagtttcttgcggaccacggcccggcgatgtgggttgctcgtctgggacctcgggcatgcccatacacgcacaacacggacgccgcaccggatgggacgtcgtaagggggcctggggtagctgggtggggtttgtgcagagcaatcagggaccgcagccagcgcatacaatcgcgctcccgtccgtttgtcccgggcagtaccacgccgtactggtattcgtaccggctgagcagggtctccagggggtggttgggggccgcggggaacggggtccacgccacggtccactcgggcaaaaaccgagtcggcacggcccacggttctcccacccacgcgtctggggtcttgatggcgataaatcttaccccgagccggattttttgggcgtattcgagaaacggcacacacagatccgccgcgcctaccacccacaagtggtagaggcgaggggggctgggttggtctcggtgcagcagtcggaagcacgccacggcgtccacgacctcggtgctctccaaggggctgtcctccgcaaacaggcccgtggtggtgtttggggggcagcgacaggacctagtgcgcacgatcgggcgggtgggtttgggtaagtccatcagcggctcggccaaccgtcgaaggttggccggacgaacgacgaccggggtacccaggggttctgatgccaaaatgcggcactgcctaagcaggaagctccacagggccgggcttgcgtcgacggaagtccggggcagggcgttgttctggtcaaggagggtcattacgttgacgacaacaacgcccatgttggtatattacaggcccgtgtccgatttggggcacttgcagatttgtaaggccacgcacggcggggagacaggccgacgcgggggctgctctaaaaatttaagggccctacggtccacagacccgccttcccgggggggcccttggagcgaccggcagcggaggcgtccgggggaggggagggtgatttacgggggggtaggtcagggggtgggtcgtcaaactgccgctccttaaaaccccggggcccgtcgttcggggtgctcgttggttggcactcacggtgcggcgaatggcctgtcgtaagttttgtcgcgtttacgggggacagggcaggaggaaggaggaggccgtcccgccggagacaaagccgtcccgggtgtttcctcatggccccttttataccccagccgaggacgcgtgcctggactccccgcccccggagacccccaaaccttcccacaccacaccacccagcgaggccgagcgcctgtgtcatctgcaggagatccttgcccagatgtacggaaaccaggactaccccatagaggacgaccccagcgcggatgccgcggacgatgtcgacgaggacgccccggacgacgtggcctatccggaggaatacgcagaggagctttttctgcccggggacgcgaccggtccccttatcggggccaacgaccacatccctcccccgtgtggcgcatctccccccggtatacgacgacgcagccgggatgagattggggccacgggatttaccgcggaagagctggacgccatggacagggaggcggctcgagccatcagccgcggcggcaagcccccctcgaccatggccaagctggtgactggcatgggctttacgatccacggagcgctcaccccaggatcggaggggtgtgtctttgacagcagccatccagattacccccaacgggtaatcgtgaaggcggggtggtacacgagcacgagccacgaggcgcgactgctgaggcgactggaccacccggcgatcctgcccctcctggacctgcatgtcgtctccggggtcacgtgtctggtcctccccaagtaccaggccgacctgtatacctatctgagtaggcgcctgaacccactgggacgcccgcagatcgcagcggtctcccggcagctcctaagcgccgttgactacattcaccgccagggcattatccaccgcgacattaagaccgaaaatatttttattaacacccccgaggacatttgcctgggggactttggcgccgcgtgcttcgtgcagggttcccgatcaagccccttcccctacggaatcgccggaaccatcgacaccaacgcccccgaggtcctggccggggatccgtataccacgaccgtcgacatttggagcgccggtctggtgatcttcgagactgccgtccacaacgcgtccttgttctcggccccccgcggccccaaaaggggcccgtgcgacagtcagatcacccgcatcatccgacaggcccaggtccacgttgacgagttttccccgcatccagaatcgcgcctcacctcgcgctaccgctcccgcgcggccgggaacaatcgcccgccgtacacccgaccggcctggacccgctactacaagatggacatagacgtcgaatatctggtttgcaaagccctcaccttcgacggcgcgcttcgccccagcgccgcagagctgctttgtttgccgctgtttcaacagaaatgaccgccccctgggggcggtgctgtttgcgggttggcacaaaaagaccccgatccgcgtctgtggtgtttttggcatcatgtcgcagggcgccatgcgtgccgttgttcccattatcccattccttttggttcttgtcggtgtatcgggggttcccaccaacgtctcctccaccacccaaccccaactccagaccaccggtcgtccctcgcatgaagcccccaacatgacccagaccggcaccaccgactctcccaccgccatcagccttaccacgcccgaccacacaccccccatgccaagtattggactggaggaggaggaagaggaggagggggccggggacggcgaacatcttgaggggggagatgggacccgtgacaccctaccccagtccccgggcccagccttcccgttggctgaggacgtcgagaaggacaaacccaaccgtcccgtagtcccatcccccgatcccaacaactcccccgcgcgccccgagaccagtcgcccgaagacaccccccaccattatcgggccgctggcaactcgccccacgacccgactcacctcaaagggacgacccttggttccgacgcctcaacataccccgctgttctcgttcctcactgcctcccccgccctggacaccctcttcgtcgtcagcaccgtcatccacaccttatcgtttttgtgtattggtgcgatggcgacacacctgtgtggcggttggtccagacgcgggcgacgcacacaccctagcgtgcgttacgtgtgcctgccgtccgaacgcgggtagggtatggggcgggggatggggagagcccacatgcggaaagcaagaacaataaaggcggtggtatctagttgatatgcatctctgggtgtttttggggtgtggcggacgcggggcggtcattggacggggtgcagttaaatacatgcccgggacccatgaagcatgcgcgacttccgggcctcagaacccacccgaaacggccaacggacgtctgagccaggcctggctatccggagaaacagcacacgacttggcgttctgtgtgtcgcgatgtctctgcgcgcagtctggcatctggggcttttgggaagcctcgtgggggctgttcttgccgccacccatcggggacctgcggccaacacaacggaccccttaacgcacgccccagtgtcccctcaccccagccccctggggggctttgccgtccccctcgtagtcggtgggctgtgcgccgtagtcctgggggcggcatgtctgcttgagctcctgcgtcgtacgtgccgcgggtgggggcgttaccatccctacatggacccagttgtcgtataatttcccccccccccccccttctccgcgtgggtgatgtcgggtccaaactcccgacaccaccagctggcatggtataaatcaccggtgcgccccccaaaccatgtccggcagggggatgggggggcgaatgcggagggcacccaacaacaccgggctaaccaggaaatccgtggccccggcccccaataaagatcgcggtagcccggccgtgtgacactatcgtccataccgaccacaccgacgaatcccccaagggggaggggccattttacgaggaggaggggtataacaaagtctgtctttaaaaagcaggggttagggagttgttcggtcataagcttcagcgcgaacgaccaactaccccgatcatcagttatccttaaggtctcttttgtgtggtgcgttccggtatggggggggctgccgccaggttgggggccgtgattttgtttgtcgtcatagtgggcctccatggggtccgcggcaaatatgccttggtggatgcctctctcaagatggccgaccccaatcgctttcgcggcaaagaccttccggtcctggaccagctgaccgaccctccgggggtccggcgcgtgtaccacatccaggcgggcctaccggacccgttccagccccccagcctcccgatcacggtttactacgccgtgttggagcgcgcctgccgcagcgtgctcctaaacgcaccgtcggaggccccccagattgtccgcggggcctccgaagacgtccggaaacaaccctacaacctgaccatcgcttggtttcggatgggaggcaactgtgctatccccatcacggtcatggagtacaccgaatgctcctacaacaagtctctgggggcctgtcccatccgaacgcagccccgctggaactactatgacagcttcagcgccgtcagcgaggataacctggggttcctgatgcacgcccccgcgtttgagaccgccggcacgtacctgcggctcgtgaagataaacgactggacggagattacacagtttatcctggagcaccgagccaagggctcctgtaagtacgccctcccgctgcgcatccccccgtcagcctgcctctccccccaggcctaccagcagggggtgacggtggacagcatcgggatgctgccccgcttcatccccgagaaccagcgcaccgtcgccgtatacagcttgaagatcgccgggtggcacgggcccaaggccccatacacgagcaccctgctgcccccggagctgtccgagacccccaacgccacgcagccagaactcgccccggaagaccccgaggattcggccctcttggaggaccccgtggggacggtggcgccgcaaatcccaccaaactggcacataccgtcgatccaggacgccgcgacgccttaccatcccccggccaccccgaacaacatgggcctgatcgccggcgcggtgggcggcagtctcctggcagccctggtcatttgcggaattgtgtactggatgcgccgccacactcaaaaagccccaaagcgcatacgcctcccccacatccgggaagacgaccagccgtcctcgcaccagcccttgttttactagatacccccccttaatgggtgcgggggggtcaggtctgcggggttgggatgggaccttaactccatataaagcgagtctggaaggggggaaaggtggacagtcgataagtcggtagcgggggacgcgcacctgttccgcctgtcgcacccacagctttttttgcgaaccgtcccgttccgggatgccgtgccgcccgttgcagggcctggtgctcgtgggcctctgggtctgtgccaccagcctggttgtccgtggccccacggtcagtctggtatcaaactcatttgtggacgccggggccttggggcccgacggcgtagtggaggaagacctgcttattctcggggagcttcgctttgtgggggaccaggtcccccacaccacctactacgatgggggcgtagagctgtggcactaccccatgggacacaaatgcccacgggtcgtgcatgtcgtcacggtgaccgcgtgcccacgtcgccccgccgtggcattcgccctgtgtcgcgcgaccgacagcactcacagccccgcatatcccaccctggagctcaatctggcccaacagccgcttttgcgggtccagagggcaacgcgggactatgccggggtgtacgtgttacgcgtatgggtcggtgacgcgccaaacgccagcctgtttgtcctggggatggccatagccgccgaagggactctggcgtacaacggctcggcctatggctcctgcgacccgaaactgcttccgtcttcggccccgcgtctggccccggcgagcgtataccaacccgcccctaaccaggcctccaccccctcgaccaccacctccaccccctcgaccaccatccccgctccctcgaccaccatccccgctccccaagcatcgaccacgcccttccccacgggagatccaaaaccacaacctcccggggtcaaccacgaacccccatctaatgccacgcgagcgacccgcgactcgcgatacgcgctaacggtgacccagataatccagatagccatccccgcgtccatcatagccctggtgtttctggggagctgtatttgctttatacacagatgtcaacgccgctaccgacgctcccgtcgcccgatttacagcccccagatgcccacgggcatctcatgcgcggtgaacgaagcggccatggcccgcctcggagccgagctcaaatcgcatccgagcaccccccccaaatcccggcgccggtcgtcacgcacgccaatgccctccctgacggccatcgccgaagagtcggagcccgctggggcggctgggcttccgacgccccccgtggaccccacgacacccaccccaacgcctcccctgttggtataggtccacggccactggccgggagcaccacataaccgaccgcagtccctgagttgggaataaaccggtattatttacctatatccgtgtatgtcgatttctttccccccctccccggaaaccaaagaaggaagcaaagaatggatgggaggagttcaggaagccggggagagggcccgcggcgcatttaaggcgttgttgtgttgactttgcctcttctggcgggttggtgcggtgctgtttgttgggctcccattttacccgaagatcggctgctatccccgggacatggatcgcggggcggtggtggggtttcttctcggtgtttgtgttgtatcgtgcttggcgggaacgcccaaaacgtcctggagacgggtgagtgtcggcgaggacgtttcgttgcttccagctccggggcctacggggcgcggcccgacccagaaactactatgggccgtggaacccctggatgggtgcggccccttacacccgtcgtgggtctcgctgatgccccccaagcaggtgcccgagacggtcgtggatgcggcgtgcatgcgcgctccggtcccgctggcgatggcgtacgcccccccggccccatctgcgaccgggggtctacgaacggacttcgtgtggcaggagcgcgcggccgtggttaaccggagtctggttattcacggggtccgagagacggacagcggcctgtataccctgtccgtgggcgacataaaggacccggctcgccaagtggcctcggtggtcctggtggtgcaaccggccccagttccgaccccacccccgaccccagccgattacgacgaggatgacaatgacgagggcgaggacgaaagtctcgccggcactcccgccagcgggaccccccggctcccgcctccccccgcccccccgaggtcttggcccagcgcccccgaagtctcacatgtgcgtggggtgaccgtgcgtatggagactccggaagctatcctgttttcccccggggagacgttcagcacgaacgtctccatccatgccatcgcccacgacgaccagacctactccatggacgtcgtctggttgaggttcgacgtgccgacctcgtgtgccgagatgcgaatatacgaatcgtgtctgtatcacccgcagctcccagaatgtctgtccccggccgacgcgccgtgcgccgcgagtacgtggacgtctcgcctggccgtccgcagctacgcggggtgttccagaacaaaccccccaccgcgctgttcggccgaggctcacatggagcccgtcccggggctggcgtggcaggcggcctccgtcaatctggagttccgggacgcgtccccacaacactccggcctgtatctgtgtgtggtgtacgtcaacgaccatattcacgcctggggccacattaccatcagcaccgcggcgcagtaccggaacgcggtggtggaacagcccctcccacagcgcggcgcggatttggccgagcccacccacccgcacgtcggggcccctccccacgcgcccccaacccacggcgccctgcggttaggggcggtgatgggggccgccctgctgctgtctgcactggggttgtcggtgtgggcgtgtatgacctgttggcgcaggcgtgcctggcgggcggttaaaagcagggcctcgggtaaggggcccacgtacattcgcgtggccgacagcgagctgtacgcggactggagctcggacagcgagggagaacgcgaccaggtcccgtggctggcccccccggagagacccgactctccctccaccaatggatccggctttgagatcttatcaccaacggctccgtctgtatacccccgtagcgatgggcatcaatctcgccgccagctcacaacctttggatccggaaggcccgatcgccgttactcccaggcctccgattcgtccgtcttctggtaaggcgccccatcccgaggccccacgtcggtcgccgaactgggcgaccgccggcgaggtggacgtcggagacgagctaatcgcgatttccgacgaacgcggacccccccgacatgaccgcccgcccctcgccacgtcgaccgcgccctcgccacacccgcgacccccgggctacacggccgttgtctccccgatggccctccaggctgtcgacgccccctccctgtttgtcgcctggctggccgctcggtggctccggggggcttccggcctgggggccgtcctgtgtgggattgcgtggtatgtgacgtcaattgcccgaggcgcataaagggccggtggtccgcctagccgcagcaaattaaaaatcgtgagtcacagcgaccgcaacttcccacccggagctttcttccggcctcgatgacgtcccggctctccgatcccaactcctcagcgcgatccgacatgtccgtgccgctttatcccacggcctcgccagtttcggtcgaagcctactactcggaaagcgaagacgaggcggccaacgacttcctcgtacgcatgggccgccaacagtcggtattaaggcgtcgacgcagacgcacccgctgcgtcggcatggtgatcgcctgtctcctcgtggccgttctgtcgggcggatttggggcgctcctgatgtggctgctccgctaaaagaccgcatcgacacgcgcgtccttcttgtcgtctctcttcccccccatcaccccgcaatttgcacccagcctttaactacattaaattgggttcgattggcaatgttgtctcccggttgatttttgggtgggtggggagtgggtgggtggggagtgggtgggtggggagtgggtgggtggggagtgggtgggtggggagtgggtgggtggggagtgggtgggtggggagtgggtgggtggggagtgggtgggtggggagtgggtgggtggggagtggcaaggaagaaacaagcccgaccaccagacagaaaatgtaaccatacccaaaccgactctgggggctgtttgtggggtcggaaccataggatgaacaaaccaccccgtaccacccgcacccaagggtgcgggtggctcatcggcatctgtccggtatgggttgttccccacccactcgcgttcggacgtcttagaatcatggcggttttctatgccgacatcggttttctcccccgcaataagacacgatgcgataaaatctgtttgtaaaatttattaagggtacaaattgccctagcacaggggtggggttagggccgggtccccacacccaaacgcaccaaacagatgcaggcagtgggtcgagtacagccccgcgtacgaacacgtcgatgcgtgtgtcagacagcaccagaaagcacaggccatcaacaggtcgtgcatgtgtcggtgggtttggacgcggggggccatggtggtgataaagttaatggccgccgtccgccagggccacaggggcgacgtctcttggttggcccggagccactgggtgtggaccagccgcgcgtggcggcccaacatggcccctgtagccgggggcgggggatcgcgcacgtttgcagcgcacatgcgagacacctcgaccacggttcgaaagaaggcccggtggtccgcgggcaacatcaccaggtgcgcaagcgcccgggcgtccagagggtagagccctgagtcatccgaggttggctcatcgcccgggtcttgccgcaagtgcgtgtgggttgggcttccggtgggcgggacgcgaaccgcggtgtggatcccgacgcgggcccgagcgtatgctccatgttgtggggagaaggggtctgggctcgccaggggggcatacttgcccgggctatacagacccgcgagccgtacgtggttcgcggggggtgcgtggggtccggggctcccggggagaccggggctcccggggagaccggggctccctgggagaccggggttgtcgtggatccctggggtcacgcggtaccctggggtctctgggagctcgcggtactctgggttccctaggttctcggggtggtcgcggaacccggggctcccggggaacacgcggtgtcctggggattgttggcggtcggacggcttcagatggcttcgagatcgtagtgtccgcaccgactcgtagtagacccgaatctccacattgccccgccgcttgatcattatcaccccgttgcgggggtccggagatcatgcgcgggtgtcctcgaggtgcgtgaacacctctggggtgcatgccggcggacggcacgccttttaagtaaacatctgggtcgcccggcccaactggggccgggggttgggtctggctcatctcgagagccacgggggggaaccaccctccgcccagagactcgggtgatggtcgtacccgggactcaacgggttaccggattacggggactgtcggtcacggtcccgccggttcttcgatgtgccacacccaaggatgcgttgggggcgatttcgggcagcagcccgggagagcgcagcaggggacgctccgggtcgtgcacggcggttctggccgcctcccggtcctcacgcccccttttattgatctcatcgcgtacgtcggcgtacgtcctgggcccaacccgcatggtgtccaggaaggtgtccgccatttccagggcccacgacatgctcccccccgacgagcaggaagcggtccacgcaacggtcgccgccggtcgcctcgacgaggacgttcctcctgcgggaaggcacgaacgcgggtgagccccctcctccgcccccgcgtcccccctcctccgcccccgcgtcccccctcctccgcccccgcgtcccccctcctccgcccccgcgtcccccctcctccgcccccgcgtccccccctcctccgcccacccaaggtgcttacccgtgcaaaaaaggcggaccggtgggtttctgtcgtcggaggcccccggggtgcgtcccctgtgtttcgtgggtggggtgggcgggtctttcccccccgcgtccgcgtgtccctttccgatgcgatcccgatcccgagccggggcgtcgcgatgccgacgccgtccgctccgacggccctctgcgactcccgctcccggtccgcgtgctccgcagccgctcccgtcgttcgtggccggcgccgtctgcgggcgtcggtcgcgccgggcctttatgtgcgccggagagacccgccccccgccgcccgggcccgcccccggggccggcgcggagtcgggcacggcgccagtgctcgcacttcgccctaataatatatatatattgggacgaagtgcgaacgcttcgcgttctcacttcttttacccggcggccccgcccccttggggcggtcccgcccgccggccaatgggggggcggcaaggcgggcggcccttgggccgcccgccgtcccgttggtcccggcgtccggcgggcgggaccggggggcccggggacggccaacgggcgcgcggggctcgtatctcattaccgccgaaccgggaagtcggggcccgggccccgccccctgcccgttcctcgttagcatgcggaacggaagcggaaaccgccggatcgggcggtaatgagatgccatgcggggcggggcgcggacccacccgccctcgcgccccgcccatggcagatggcgcggatgggcggggccgggggttcgaccaacgggccgcggccacgggcccccggcgtgccggcgtcggggcggggtcgtgcataatggaattccgttcggggtgggcccgccgggggggcggggggccggcggcctccgctgctcctccttcccgccggcccctgggactatatgagcccgaggacgccccgatcgtccacacggagcgcggctgccgacacggatccacgacccgacgcgggaccgccagagacagaccgtcagacgctcgccgcgccgggacgccgatacgcggacgaagcgcgggagggggatcggccgtccctgtcctttttcccacccaagcatcgaccggtccgcgctagttccgcgtcgacggcgggggtcgtcggggtccgtgggtctcgccccctccccccatcgagagtccgtaggtgacctaccgtgctacgtccgccgtcgcagccgtatccccggaggatcgccccgcatcggcgatggcgtcggagaacaagcagcgccccggctccccgggccccaccgacgggccgccgcccaccccgagcccagaccgcgacgagcggggggccctcgggtggggcgcggagacggaggagggcggggacgaccccgaccacgaccccgaccacccccacgacctcgacgacgcccggcgggacgggagggcccccgcggcgggcaccgacgccggcgaggacgccggggacgccgtctcgccgcgacagctggctctgctggcctccatggtagaggaggccgtccggacgatcccgacgcccgaccccgcggcctcgccgccccggacccccgcctttcgagccgacgacgatgacggggacgagtacgacgacgcagccgacgccgccggcgaccgggccccggcccggggccgcgaacgggaggccccgctacgcggcgcgtatccggaccccacggaccgcctgtcgccgcgcccgccggcccagccgccgcggagacgtcgtcacggccggtggcggccatcggcgtcatcgacctcgtcggactccgggtcctcgtcctcgtcgtccgcatcctcttcgtcctcgtcgtccgacgaggacgaggacgacgacggcaacgacgcggccgaccacgcacgcgaggcgcgggccgtcgggcggggtccgtcgagcgcggcgccggcagcccccgggcggacgccgcccccgcccgggccaccccccctctccgaggccgcgcccaagccccgggcggcggcgaggacccccgcggcctccgcgggccgcatcgagcgccgccgggcccgcgcggcggtggccggccgcgacgccacgggccgcttcacggccgggcagccccggcgggtcgagctggacgccgacgcggcctccggcgccttctacgcgcgctatcgcgacgggtacgtcagcggggagccgtggcccggcgccgggcccccgcccccggggcgggtgctgtacggcggcctgggcgacagccgcccgggcctctggggggcgcccgaggcggaggaggcgcgacgccggttcgaggcctcgggcgccccggcggccgtgtgggcgcccgagctgggcgacgccgcgcagcagtacgccctgatcacgcggctgctgtacaccccggacgcggaggccatggggtggctccagaacccgcgcgtggtccccggggacgtggcgctggaccaggcctgcttccggatctcgggcgccgcgcgcaacagcagctccttcatcaccggcagcgtggcgcgggccgtgccccacctgggctacgccatggcggccggccgcttcggctggggcctggcgcacgcggcggccgccgtggccatgagccgccgatacgaccgcgcgcagaagggcttcctgctgaccagcctgcgccgcgcctacgcgcccctgttggcgcgcgagaacgcggcgctgacgggggccgcggggagccccggcgccggcgcagatgacgagggggtcgccgccgtcgccgccgccgcaccgggcgagcgcgcggtgcccgccgggtacggcgccgcggggatcctcgccgccctggggcggctgtccgccgcgcccgcctcccccgcggggggcgacgaccccgacgccgcccgccacgccgacgccgacgacgacgccgggcgccgcgcccaggccggccgcgtggccgtcgagtgcctggccgcctgccgcgggatcctggaggcgctggccgagggcttcgacggcgacctggcggccgtcccggggctggccggggcccggcccgccagccccccgcggccggagggacccgcgggccccgcttccccgccgccgccgcacgccgacgcgccccgcctgcgcgcgtggctgcgcgagctgcggttcgtgcgcgacgcgctggtgctcatgcgcctgcgcggggacctgcgcgtggccggcggcagcgaggccgccgtggccgccgtgcgcgccgtgagcctggtcgccggggccctgggccccgcgctgccgcgggacccgcgcctgccgagctccgcggccgccgccgccgcggacctgctgtttgacaaccagagcctgcgccccctgctggcggcggcggccagcgcaccggacgccgccgacgcgctggcggccgccgccgcctccgccgcgccgcgggaggggcgcaagcgcaagagtcccggcccggcccggccgcccggaggcggcggcccgcgacccccgaagacgaagaagagcggcgcggacgcccccggctcggacgcccgcgcccccctccccgcgcccgcgcccccctccacgcccccggggcccgagcccgcccccgcccagcccgcggcgccccgggccgccgcggcgcaggcccgcccgcgccccgtggcgctgtcgcgccggcccgccgagggccccgaccccctgggcggctggcggcggcagcccccggggcccagccacacggcggcgcccgcggccgccgccctggaggcctactgctccccgcgcgccgtggccgagctcacggaccacccgctgttccccgtcccctggcgaccggccctcatgtttgacccgcgggccctggcctcgatcgccgcgcggtgcgccgggcccgcccccgccgcccaggccgcgtgcggcggcggcgacgacgacgataacccccacccccacggggccgccgggggccgcctctttggccccctgcgcgcctcgggcccgctgcgccgcatggcggcctggatgcgccagatccccgaccccgaggacgtgcgcgtggtggtgctgtactcgccgctgccgggcgaggacctggccggcggcggggcctcgggggggccgccggagtggtccgccgagcgcggcgggctgtcctgcctgctggcggccctggccaaccggctgtgcgggccggacacggccgcctgggcgggcaactggaccggcgcccccgacgtgtcggcgctgggcgcacagggcgtgctgctgctgtccacgcgggacctggccttcgccggggccgtggagtttctggggctgctcgccagcgccggcgaccggcggctcatcgtggtcaacaccgtgcgcgcctgcgactggcccgccgacgggcccgcggtgtcgcggcagcacgcctacctggcgtgcgagctgctgcccgccgtgcagtgcgccgtgcgctggccggcggcgcgggacctgcgccgcacggtgctggcctcgggccgcgtgttcggcccgggggtcttcgcgcgcgtggaggccgcgcacgcgcgcctgtaccccgacgcgccgccgctgcgcctgtgccgcggcggcaacgtgcgctaccgcgtgcgcacgcgcttcggcccggacacgccggtgcccatgtccccgcgcgagtaccgccgggccgtgctgccggcgctggacggccgggcggcggcctcggggaccaccgacgccatggcgcccggcgcgccggacttctgcgaggaggaggcccactcgcaccgcgcctgcgcgcgctggggcctgggcgcgccgctgcggcccgtgtacgtggcgctggggcgcgaggcggtgcgcgccggcccggcccggtggcgcgggccgcggagggacttttgcgcccgcgccctgctggagcccgacgacgacgcccccccgctggtgctgcgcggcgacgacgacggcccgggggccctgccgccggcgccgcccgggattcgctgggcctcggccacgggccgcagcggcaccgtgctggcggcggcgggggccgtggaggtgctgggggcggaggcgggcttggccacgcccccgcggcgggaagttgtggactgggaaggcgcctgggacgaagacgacggcggcgcgttcgagggggacggggtgctgtaacgggccgggacggggcggggcgcttgtgagacccgaagacgcaataaacggcaacaacctgattaagttttgcagtagcgttgtttattcgaggggcgggagggggcgaggggcgggagggggcgaggggcgggagggggcgaggggcgggagggggcgaggggcgggagggggcgaggggcgggagggggcgaggggcgggagggggcgaggggcgggagggggcgaggggcgggagggggcgaggggcgggagggggcgaggggcgggagggggcgaggggcgggagggggcgaggggcgggagggggcgaggggcgggagggggcgaggggcgggagggggcgaggggcgggagggggcgaggggcgggagggggcgaggggcgggagggggcgaggggcgggagggggcgaggggcggtggtggtgcgcgggcgcccccggagggtttggatctctgacctgagattggcggcactgaggtagagatgcccgaacccccccgagggagcgcgggacgcggccggggagggctggggccggggagggctggggccggggagggctggggccggggagggctggggccggggagggctggggccggggagggctggggccggggagggctggggccggggagggctggggctggggaggggcggtggtgtgtagcaggagcggtgtgttgcgccggggtacgtctggaggagcgggaggtgcgcggtgacgtgtggatgaggaacaggagttgttgcgcggtgagttgtcgctgtgagttgtgttgttgggcaggtgtggtggatgacgtgacgtgtgacgtgcggagtgcgccgtgctctgttggtttcacctgtggcagcccgggccccccgcgggcgcgcgcgcgcgcaaaaaaggcgggcggcggtccgggcggcgtgcgcgcgcgcggcgggcgtggggggcggggccgcgggagcggggggaggagcggggggaggagcggggggaggagcggggggaggagcggggggaggagcggggggaggagcggggggaggagcggggggaggagcggggggaggagcggggggaggagcggggggaggagcggggggaggagcggggggaggagcggggggaggagcggggggaggagcggggggaggagcggggggaggagcggggggaggagcggccagaccccgaaaacgggccccccccaaaacacaccccccgggggtcgcgcgcggccctttaaagcggcggcggcgggc

SEQ ID NO: 24 - DNA, 151303 bp, Artificial Sequence
  Recombinant HSV-1
agcccgggccccccgcgggcgcgcgcgcgcgcaaaaaaggcgggcggcggtccgggcggcgtgcgcgcgcgcggcgggcgtggggggcggggccgcgggagcggggggaggagcggggggaggagcggggggaggagcggggggaggagcggggggaggagcggggggaggagcggggggaggagcggggggaggagcggggggaggagcggggggaggagcggggggaggagcggggggaggagcggggggaggagcggggggaggagcggggggaggagcggggggaggagcggggggaggagcggggggaggagcggccagaccccgaaaacgggccccccccaaaacacaccccccgggggtcgcgcgcggccctttaaagcggcggcggcgggcagcccgggccccccgcggccgagactagcgagttagacaggcaagcactactcgcctctgcacgcacatgcttgcctgtcaaactctaccaccccggcacgctctctgtctccatggcccgccgccgccgccatcgcggcccccgccgcccccggccgcccgggcccacgggcgccgtcccaaccgcacagtcccaggtaacctccacgcccaactcggaacccgcggtcaggagcgcgcccgcggccgccccgccgccgccccccgccggtgggcccccgccttcttgttcgctgctgctgcgccagtggctccacgttcccgagtccgcgtccgacgacgacgatgacgacgactggccggacagccccccgcccgagccggcgccagaggcccggcccaccgccgccgccccccggccccggcccccaccgcccggcgtgggcccggggggcggggctgacccctcccaccccccctcgcgccccttccgccttccgccgcgcctcgccctccgcctgcgcgtcaccgcggagcacctggcgcgcctgcgcctgcgacgcgcgggcggggagggggcgccggagccccccgcgacccccgcgacccccgcgacccccgcgacccccgcgacccccgcgcgggtgcgcttctcgccccacgtccgggtgcgccacctggtggtctgggcctcggccgcccgcctggcgcgccgcggctcgtgggcccgcgagcgggccgaccgggctcggttccggcgccgggtggcggaggccgaggcggtcatcgggccgtgcctggggcccgaggcccgtgcccgggccctggcccgcggagccggcccggcgaactcggtctaacgttacacccgaggcggcctgggtcttccgcggagctcccgggagctccgcaccaagccgctctccggagagacgatggcaggagccgcgcatatatacgcttggagccagcccgccctcacagggcgggcccgcctcgggggcgggactggccaatcggcggccgccagcgcggcggggcccggccaaccagcgtccgccgagtcttcggggcccggcccattgggcgggagttaccgcccaatgggccgggccgcccacttcccggtatggtaattaaaaacttgcaagaggccttgttccgcttcccggtatggtaattagaaactcattaatgggcggccccggccgcccttcccgcttccggcaattcccgcggcccttaatgggcaaccccggtattccccgcctcccgcgccgcgcgtaaccactcccctggggttccgggttatgctaattgcttttttggcggaacacacggcccctcgcgcattggcccgcgggtcgctcaatgaacccgcattggtcccctggggttccgggtatggtaatgagtttcttcgggaaggcgggaagccccggggcaccgacgcaggccaagcccctgttgcgtcggcgggaggggcatgctaatggggttctttgggggacaccgggttgggcccccaaatcgggggccgggccgtgcatgctaatgatattctttgggggcgccgggttggtccccggggacggggccgccccgcggtgggcctgcctcccctgggacgcgcggccattgggggaatcgtcactgccgcccctttggggaggggaaaggcgtggggtataagttagccctggcccgacagtctggtcgcatttgcacctcggcactcggagcgagacgcagcagccaggcagactcgggccgccccctctccgcatcaccacagaagccccgcctacgttgcgacccccagggaccctccgtccgcgaccctccagccgcatacgacccccagttattaatagtaatcaattacggggtcattagttcatagcccatatatggagttccgcgttacataacttacggtaaatggcccgcctggctgaccgcccaacgacccccgcccattgacgtcaataatgacgtatgttcccatagtaacgccaatagggactttccattgacgtcaatgggtggagtatttacggtaaactgcccacttggcagtacatcaagtgtatcatatgccaagtacgccccctattgacgtcaatgacggtaaatggcccgcctggcattatgcccagtacatgaccttatgggactttcctacttggcagtacatctacgtattagtcatcgctattaccatggtgatgcggttttggcagtacatcaatgggcgtggatagcggtttgactcacggggatttccaagtctccaccccattgacgtcaatgggagtttgttttggcaccaaaatcaacgggactttccaaaatgtcgtaacaactccgccccattgacgcaaatgggcggtaggcgtgtacggtgggaggtctatataagcagagctcgtttagtgaaccgtcagatcgatgtggctgcagagcctgctgctcttgggcactgtggcctgcagcatctctgcacccgcccgctcgcccagccccagcacgcagccctgggagcatgtgaatgccatccaggaggcccggcgtctcctgaacctgagtagagacactgctgctgagatgaatgaaacagtagaagtcatctcagaaatgtttgacctccaggagccgacctgcctacagacccgcctggagctgtacaagcagggcctgcggggcagcctcaccaagctcaagggccccttgaccatgatggccagccactacaagcagcactgccctccaaccccggaaacttcctgtgcaacccagattatcacctttgaaagtttcaaagagaacctgaaggactttctgcttgtcatcccctttgactgctgggagccagtccaggagtgaaataaagcaatagcatcacaaatttcacaaataaagcattattttgtgaggcggggggcggcaaggaccctgggggaggaggaggaggagggggggggagggaggaataggcgggcgggcgaggaaagggcgggccggggagggggcgtaacctgatcgcgccccccgttgtctcttgcagcagactacgtaccgcccgccccccgccggacgccccgcgcccccccacgcagaggcgccgccgcgccccccgtgacgggcggggcgtctcacgcagccccccagccggccgcggctcggacagcgcccccctcggcgcccatcgggccacacggcagcagtaacaccaacaccaccaccaacagcagcggcggcggcggctcccgccagtcgcgagccgcggcgccgcggggggcgtctggcccctccgggggggttggggttggggttggggttgttgaagcggaggcggggcggccgaggggccggacgggcccccttgtcaacagacccgccccccttgcaaacaacagagaccccatagtgatcagcgactcccccccggcctctccccacaggccccccgcggcgcccatgccaggctccgccccccgccccgggccccccgcgtccgcggccgcgtcgggacccgcgcgcccccgcgcggccgtggccccgtgcgtgcgagcgccgcctccggggcccggcccccgcgccccggcccccggggcggagccggccgcccgccccgcggacgcgcgccgtgtgccccagtcgcactcgtccctggctcaggccgcgaaccaagaacagagtctgtgccgggcgcgtgcgacggtggcgcgcggctcgggggggccgggcgtggagggtgggcacgggccctcccgcggcgccgccccctccggcgccgccccgctcccctccgccgcctctgtcgagcaggaggcggcggtgcgtccgaggaagaggcgcgggtcgggccaggaaaacccctccccccagtccacgcgtccccccctcgcgccggcaggggccaagagggcggcgacgcaccccccctccgactcagggccgggggggcgcggccagggtgggcccgggacccccctgacgtcctcggcggcctccgcctcttcctcctctgcctcttcctcctcggccccgacccccgcgggggccgcctcttccgccgccggggccgcgtcctcctccgcttccgcctcctcgggcggggccgtcggtgccctgggagggagacaagaggaaacctccctcggcccccgcgctgcttctgggccgcgggggccgaggaagtgtgcccggaagacgcgccacgcggagacttccggggccgtccccgcgggcggcctcacgcgctacctgcccatctcgggggtctctagcgtggtcgccctgtcgccttacgtgaacaagactatcacgggggactgcctgcccatcctggacatggagacggggaacatcggggcgtacgtggtcctggtggaccagacgggaaacatggcgacccggctgcgggccgcggtccccggctggagccgccgcaccctgctccccgagaccgcgggtaaccacgtgatgccccccgagtacccgacggcccccgcgtcggagtggaacagcctctggatgacccccgtggggaacatgctgttcgaccagggcaccctagtgggcgccctggacttccgcagcctgcggtctcggcacccgtggtccggggagcagggggcgtcgacccgggacgagggaaaacaataagggacgccccccgtgtttgtggggaggggggggtcgggcgctgggtggtctctggccgcgcccactacaccagccaatccgtgtcggggaggggaaaagtgaaagacacgggcaccacacaccagcgggtcttttgtgttggccctaataaaaaaaaactcaggggatttttgctgtctgttgggaaataaaggtttacttttgtatcttttccctgtctgtgttggatgtatcgcggggatgcgtgggagtgggggtgcgtgggagtgggggtgcgtgggagtgggggtgcgtgggagtgggggtgcgtgggagtgggggtgcgtgggagtgggggtgcgtgggagtgggggtgcgtgggagtgggggtgcgtgggagtgggggtgccatgttgggcaggctctggtgttaaccacagagccgcggcccgggctgcctgaccaccgatccccgaaagcatcctgccactggcatggagccagaaccacagtgggttgggtgtgggtgttaagtttccgcgagcgcctgcccgcccggactgacctggcctctggccgccacaaagggcggggggggttaactacactatagggcaacaaaggatgggaggggtggcggggcgggacggggcgcccaaaagggggtcggccacaccacagacgtgggtgttggggggtggggcggaggggtgggggggggggagacagaaacaggaacatagttagaaaacaagaatgcggtgcagccagagaatcacaggagacgaggggatgggcgtgttggttaccaacccacacccaggcatgctcggtggtatgaaggagggggggcggtgcttcttagagaccgccgggggacgtggggttggtgtgcaaaggcacgcgcacccgcgccggccaggtgggccggtactccatccccccctcccccgacccttcccacccccgcgtgccagagatcaccccggtcccccggcacccgccactcctccgtatcctcgctttaggaacaactttagggggggtacacacgcgccgtgcatttccttccacaccccccctcccccgcactccccccccccaggcagtaagacccaagcatagagagccaggcacaaaaacacaggcggggtgggacacatgccttcttggagtacgtgggtcattggcgtggggggttacagcgacaccggccgaccccctggcggtcttccagccggcccttagataagggggcagttggtggtcggacgggtaagtaacagagtctgactaagggtgggagggggggaaaagaacgggctggtgtgctgtaacacgagcccacccgcgagtggcgtggccgaccttagcctctggggcgccccctgtcgtttgggtcccccccctctattggggagaagcaggtgtctaacctacctggaaacgcggcgtctttgttgaacgacaccggggcgccctcgacgagtgggataacgggggaggaagggagggaggagggtactgggggtgaagaaggggggggggagaagcgagaacaggaaaggcgatggagcccggcagaacaccgaggaaaaaaaaaccacagcgcatgcgccgggccgttgtggggccccgggccggggccccttgggtccgccggggccccgggccgggccgccacgggggccggccgttggcggtaaccccgagtgttcatctcaggccccgggccgggaacccggaaaagcctccggggggcctttttcgcgtcgcgtgccggcgagcgggtccggacggggcccggaccgccgcggtcgggggcccctcgtcccgggccgtacgcggccttcgccccgtgaggggacagacgaacgaaacattccggcgacggaacgaaaaacaccccagacgggttaaagaaacagaaaccgcaacccccaccacccccgaaacggggaaaacgaaaaaacagaccagcggccggccggcgcttagggggaggatgtcgccgacgccccttggccgccccggctgcaggggggcccggagagccgcggcacccggacgcgcccggaaagtctttcgcaccacccgcgatcggcacggccgcgcccccgcttttataaaggctgagatgacgcagcaaaaacaggccacagcaccacgtgggtaggtgatgtaattttattttcctcgtctgcggcctaatggatttccgggcgcggtgcccctgtctgcagagcacttaacggattgatatctcgcgggcacgcgcgcccttaatggaccggcgcggggcggggggccggatacccacacgggcggggggggggtgtcgcgggccgtctgctggcccgcggccacataaacaatgactctgggcctttctgcctctgccgcttgtgagtgcgcgcgccggctctgcggtgtcggcggcggctgcggcggctgcggcggccgccgtgttcggtctcggtagccggccggcgggtggactcgcggggggccggagggtggaaggcaggggggtgtaggatgggtatcaggacttccacttcccgtccttccatcccccgttcccctcggttgttcctcgcctcccccaacaccccgccgctttccgttggggttgttattgttgtcgggatcgtgcgggccgggggtcgccggggcaggggcgggggcgtgggcgggggtgctcgtcgatcgaccgggctcagtgggggcgtggggtgggtgggagaaggcgaggagactggggtgggggtgtcggtgggtggttgttttttgtggttgtttttgtgtctgttcccgtcccccgtcaccccctccctccgtcccctccgtccccccgtcgcgggtgtttgtgtttgtttattccgacattggtttatttaaataaacacagccgttctgcgtgtctgttcttgcgtgtggctgggggcttatatgtggggtcccgggggcgggatggggtttagcggcggggggcggcgcgccggacggggcgctggagataacggcccccggggaacgggggaccggggctgggtatcccgaggtgggtgggtgggcggcggtggccgggccgggccgggccgggccgggccgggtgggcggggtttggaaaaacgaggaggaggaggagaaggcgggggggggggagacggggggaaagcaaggacacggcccggggggtgggagcgcgggccgggccgctcgtaagagccgcgacccggccgccggggagcgttgtcgccgtcggtctgccggcccccgtccctcccttttttgaccaaccagcgccccccccccctcaccaccattcctactaccaccaccaccaccaccaccgacacctcccgcgcacccccgcccacatccccccccaacccgcaccaccagcacgggttgggggtagcaggggatcaaaggggggcaaagccggcggggcggttcggggggggggggggggggcgggagaccaagtaggcccgcccatccgcggcccctcccggcagccacgcccccagcgtcgggtgtcacggggaaagagcagaggggagaggggagagggggggagaggggagagggggggagaggggagagggggggagaggggagagggggggagaggggagagggggggagaggggagagggggggagaggggagagggggggagaggggagagggggggagaggggagagggggggagaggggagagggggggagagggggtatataaaccaacgaaaagcgcgggaacggggatacggggcttgtgtggcacgacgtcgtggttgtgttactgggcaaacacttggggactgtaggtttctgtgggtgccgaccctaggcgctatggggattttgggttgggtcgggcttattgccgttggggttttgtgtgtgcgggggggcttgccttcaaccgaatatgttattcggagtcgggtggctcgagaggtgggggatatattaaaggtgccttgtgtgccgctcccgtctgacgatcttgattggcgttacgagaccccctcggctataaactatgctttgatagacggtatatttttgcgttatcactgtcccggattggacacggtcttgtgggataggcatgcccagaaggcatattgggttaacccctttttatttgtggcgggttttttggaggacttgagttaccccgcgtttcctgccaacacccaggaaacagaaacgcgcttggccctttataaagagatacgccaggcgctggacagtcgcaagcaggccgccagccacacacctgtgaaggctgggtgtgtgaactttgactattcgcgcacccgccgctgtgtagggcgacaggatttgggacctaccaacggaacgtctggacggaccccggttctgccgccggacgatgaagcgggcctgcagccgaagcccctcaccacgccgccgcccatcatcgccacgtcggaccccaccccgcgacgggacgccgccacaaaaagcagacgccgacgaccccactcccggcgcctctaacgatgcctcgacggaaacccgtccgggttcggggggcgaaccggccgcctgtcgctcgtcagggccggcgggcgctcctcgccgccctagaggctgtcccgctggtgtgacgttttcctcgtccgcgccccccgaccctcccatggatttaacaaacgggggggtgtcgcctgcggcgacctcggcgcctctggactggaccacgtttcggcgtgtgtttctgatcgacgacgcgtggcggcccctgatggagcctgagctggcgaaccccttaaccgcccacctcctggccgaatataatcgtcggtgccagaccgaagaggtgctgccgccgcgggaggatgtgttttcgtggactcgttattgcacccccgacgaggtgcgcgtggttatcatcggccaggacccatatcaccaccccggccaggcgcacggacttgcgtttagcgtgcgcgcgaacgtgccgcctcccccgagtcttcggaatgtcttggcggccgtcaagaactgttatcccgaggcacggatgagcggccacggttgcctggaaaagtgggcgcgggacggcgtcctgttactaaacacgaccctgaccgtcaagcgcggggcggcggcgtcccactctagaatcggttgggaccgcttcgtgggcggagttatccgccggttggccgcgcgccgccccggcctggtgtttatgctctggggcacacacgcccagaatgccatcaggccggaccctcgggtccattgcgtcctcaagttttcgcacccgtcgcccctctccaaggttccgttcggaacctgccagcatttcctcgtggcgaaccgatacctcgagacccggtcgatttcacccatcgactggtcggtttgaaaggcatcgacgtccggggtttttgtcggtgggggcttttgggtatttccgatgaataaagacggttaatggttaaacctctggtctcatacgggtcggtgatgtcgggcgtcgggggagagggagttccctctgcgcttgcgattctagcctcgtggggctggacgttcgacacgccaaaccacgagtcggggatatcgccagatacgactcccgcagattccattcggggtgccgctgtggcctcacctgaccaacctttacacgggggcccggaacgggaggccacagcgccgtctttctccccaacgcgcgcggatgacggcccgccctgtaccgacgggccctacgtgacgtttgataccctgtttatggtgtcgtcgatcgacgaattagggcgtcgccagctcacggacaccatccgcaaggacctgcggttgtcgctggccaagtttagcattgcgtgcaccaagacctcctcgttttcgggaaacgccccgcgccaccacagacgcggggcgttccagcgcggcacgcgggcgccgcgcagcaacaaaagcctccagatgtttgtgttgtgcaaacgcgcccacgccgctcgagtgcgagagcagcttcgggtcgttattcagtcccgcaagccgcgcaagtattacacgcgatcttcggacgggcggctctgccccgccgtccccgtgttcgtccacgagttcgtctcgtccgagccaatgcgcctccaccgagataacgtcatgctggcctcgggggccgagtaaccgccccccccccatgccaccctcactgcccgtcgcgcgtgtttgatgttaataaataacacataaatttggctggttgtttgttgtctttaatggaccgcccgcaagggggggggggcatttcagtgtcgggtgacgagcgcgatccggccgggatcctaggaccccaaaagtttgtctgcgtattccagggcggggctcagttgaatctcccgcagcacctctaccagcaggtccgcggtgggctggagaaactcggccgtcccggggcaggcggttgtcgggggtggaggcgcggcgcccaccccgtgtgccgcgcctggcgtctcctctgggggcgacccgtaaatggttgcagtgatgtaaatggtgtccgcggtccagaccacggtcaaaatgccggccgtggcgctccgggcgctttcgccgcgcgaggagctgacccaggagtcgaacggatacgcgtacatatgggcgtcccacccgcgttcgagcttctggttgctgtcccggcctataaagcggtaggcacaaaattcggcgcgacagtcgataatcaccaacagcccaatgggggtgtgctggataacaacgcctccgcgcggcaggcggtcctggcgctcccggccccgtaccatgatcgcgcgggtgccgtactcaaaaacatgcaccacctgcgcggcgtcgggcagtgcgctggtcagcgaggccctggcgtggcataggctatacgcgatggtcgtctgtggattggacatctcgcggtgggtagtgagtcccccgggccgggttcggtggaactgtaaggggacggcgggttaatagacaatgaccacgttcggatcgcgcagagccgatagtatgtgctcactaatgacgtcatcgcgctcgtggcgctcccggagcggatttaagttcatgcgaaggaattcggaggaggtggtgcgggacatggccacgtacgcgctgttgaggcgcaggttgccgggcgtaaagcagatggcgaccttgtccaggctaaggccctgggagcgcgtgatggtcatggcaagcttggagctgatgccgtagtcggcgtttatggccatggccagctccgtagagtcaatggactcgacaaactcgctgatgttggtgttgacgacggacatgaagccgtgttggtcccgcaagaccacgtaaggcaggggggcctcttccagtaactcggccacgttggccgtcgcgtgccgcctccgcagctcgtccgcaaaggcaaacacccgtgcgtacgtgtatcccatgagcgtataattgtccgtctgcagggcgacggacatcagccccccgcgcggcgagccggtcagcatctcgcagccccggaagataacgttgtccacgtacgtgctaaagggggcgacttcaaatgcctccccgaagagctcttggaggattcggaatctcccgaggaaggcccgcttcagcagcgcaaactgggtgtgaacggcggcggtggtctccggttccccgggggtgtagtggcagtaaaacacgtcgagctgttgttcgtccagccccgcgaaaataacgtcgaggtcgtcgtcgggaaaatcgtccgggcccccgtcccgcggccccagttgcttaaaatcaaacgcacgctcgccgggggcgcctgcgtcggccattaccgacgcctgcgtcggcacccccgaagatttggggcgcagagacagaatctccgccgttagttctcccatgcgggcgtaggcgagggtcctctgggtcgcatccaggcccgggcgctgcagaaagttgtaaaaggagataagcccgctaaatatgagccgcgacaggaacctgtaggcaaactccaccgaagtctccccctgagtctttacaaagctgtcgtcacgcaacactgcctcgaaggcccggaacgtcccactaaacccaaaaaccagttttcgcaggcgcgcggtcaccgcgatctggctgttgaggacgtaagtgacgtcgttgcgggccacgaccagctgctgtttgctgtgcacctcgcagcgcatgtgccccgcgtcctggtcctggctctgcgagtagttggtgatgcggctggcgttggccgtgagccacttttcaatcgtcaggccgggctggtgtgtcagccgtcggtattcgtcaaactccttgaccgacacgaacgtaagcacggggagggtgaacacgacgaactccccctcacgggtcaccttcaggtaggcgtggagcttggccatgtacgcgctcacctctttgtgggaggagaacagccgcgtccagccggggaggttggcggggttggtgatgtagttttccgggacgacgaagcgatccacgaactgcatgtgctcctcggtgatgggcaggccgtactccagcaccttcatgaggttaccgaactcgtgctcgacgcaccgtttgttgttaataaaaatggcccagctatacgagaggcgggcgtactcgcgcagcgtgcggttgcagatgaggtacgtgagcacgttctcgctctggcggacggaacaccgcagtttctggtgctcgaaggtcgactccagggacgccgtctgcgtcggcgagcccacacacaccaacacgggccgcaggcgggccgcgtactggggggtgtggtacagggcgttaatcatccaccagcaatacaccacggccgtgaggaggtgacgcccaaggagcccggcctcgtcgatgacgatcacgttgctgcgggtaaaggccggcagcgccccgtgggtggccggggccaaccgcgtcagggcgccctcggccaaccccagggtccgttccagggcggccagggcgcgaaactcgttccgcaactcctcgcccccggaggcggccagggcgcgcttcgtgaggtccaaaatcacctcccagtagtacgtcagatctcgtcgctgcaggtcctccagcgaggcggggttgctggtcagggtgtacgggtactgtcccagttgggcctggacgtgattcccgcgaaacccaaattcatgaaagatggtgttgatgggtcggctgagaaaggcgcccgagagtttggcgtacatgttttgggccgcaatgcgcgtggcgcccgtcaccacacagtccaagacctcgttgattgtctgcacgcacgtgctctttccggagccagcgttgccggtgataagatacaccgcgaacggaaactccctgaggggcaggcctgcgggggactctaaggccgccacgtcccggaaccactgcagatggggcacttgcgctccgtcgagctgttgttgcgagagctctcggatgcgcttaaggattggctgcaccccgtgcatagacgtaaaatttaaaaaggcctcggccctccctggaacggctggtcggtccccgggttgctgaaggtgcggcgggccgggtttctgtccgtctagctggcgctccccgccggccgccgccatgaccgcaccacgctcgcgggcccccactacgcgtgcgcggggggacacggaagcgctgtgctcccccgaggacggctgggtaaaggttcaccccacccccggtacgatgctgttccgcgagattctccacgggcagctggggtataccgagggccagggggtgtacaacgtcgtccggtccagcgaggcgaccacccggcagctgcaggcggcgatctttcacgcgctcctcaacgccaccacttaccgggacctcgaggcggactggctcggccacgtggcggcccgcggtctgcagccccaacggctggttcgccggtacaggaacgcccgggaggcggatatcgccggggtggccgagcgggtgttcgacacgtggcggaacacgcttaggacgacgctgctggactttgcccacgggttggtcgcctgctttgcgccgggcggcccgagcggcccgtcaagcttccccaaatatatcgactggctgacgtgcctggggctggtccccatattacgcaagcgacaagaagggggtgtgacgcagggtctgagggcgtttctcaagcagcacccgctgacccgccagctggccacggtcgcggaggccgcggagcgcgccggccccgggttttttgagctggcgctggccttcgactccacgcgcgtggcggactacgaccgcgtgtatatctactacaaccaccgccggggcgactggctcgtgcgagaccccatcagcgggcagcgcggagaatgtctggtgctgtggccccccttgtggaccggggaccgtctggtcttcgattcgcccgtccagcggctgtttcccgagatcgtcgcgtgtcactccctccgggaacacgcgcacgtctgccggctgcgcaataccgcgtccgtcaaggtgctgctggggcgcaagagcgacagcgagcgcggggtggccggtgccgcgcgggtcgttaacaaggtgttgggggaggacgacgagaccaaggccgggtcggccgcctcgcgcctcgtgcggcttatcatcaacatgaagggcatgcgccacgtaggcgacattaacgacaccgtgcgtgcctacctcgacgaggccggggggcacctgatagacgccccggccgtcgacggtaccctccctggattcggcaagggcggaaacagccgcgggtctgcgggccaggaccagggggggcgggcgccgcagcttcgccaggccttccgcacggccgtggttaacaacatcaacggcgtgttggagggctatataaataacctgtttggaaccatcgagcgcctgcgcgagaccaacgcgggcctggcgacccaattgcaggagcgcgaccgcgagctccggcgcgcaacagcgggggccctggagcgccagcagcgcgcggccgacctggcggccgagtccgtgaccggtggatgcggcagccgccctgcgggggcggacctgctccgggccgactatgacattatcgacgtcagcaagtccatggacgacgacacgtacgtcgccaacagctttcagcacccgtacatcccttcgtacgcccaggacctggagcgcctgtcgcgcctctgggagcacgagctggtgcgctgttttaaaattctgtgtcaccgcaacaaccagggccaagagacgtcgatctcgtactccagcggggcgatcgccgcattcgtcgccccctactttgagtcagtgcttcgggccccccgggtaggcgcgcccatcacgggctccgatgtcatcctgggggaggaggagttatgggatgcggtgtttaagaaaacccgcctgcaaacgtacctgacagacatcgcggccctgttcgtcgcggacgtccagcacgcagcgctgcccccgcccccctccccggtcggcgccgatttccggcccggcgcgtccccgcggggccggtccagatcgcggtcgcccggaagaactgcgcgaggcgcgccggaccagggcgggggcatcgggcaccgggatggccgccgcgacggccgacgatgaggggtcggccgccaccatcctcaagcaggccatcgccggggaccgcagcctggtcgaggcggccgaggcgattagccagcagacgctgctccgcctggcctgcgaggtgcgccaggtcggcgaccgccagccgcggtttaccgccaccagcatcgcgcgcgtcgacgtcgcgcctgggtgccggttgcggttcgttctggacgggagtcccgaggacgcctatgtgacgtcggaggattactttaagcgctgctgcggccagtccagttatcgcggcttcgcggtggcggtcctgacggccaacgaggaccacgtgcacagcctggccgtgccccccctcgttctgctgcaccggttctccctgttcaaccccagggacctcctggactttgagcttgcctgtctgctgatgtacctggagaactgcccccgaagccacgccaccccgtcgacctttgccaaggttctggcgtggctcggggtcgcgggtcgccgcacgtccccattcgaacgcgttcgctgccttttcctccgcagttgccactgggtcctaaacacactcatgttcatggtgcacgtaaaaccgttcgacgacgagttcgtcctgccccactggtacatggcccggtacctgctggccaacaacccgccccccgttctctcggccctgttctgtgccaccccgacgagctcctcattccggctgccggggccgcccccccgctccgactgcgtggcctataaccccgccgggatcatggggagctgctgggcgtcggaggaggtgcgcgcgcctctggtctattggtggctttcggagaccccaaaacgacagacgtcgtcgctgttttatcagttttgttgaattttaggaaataaacccggttttgtttctgtggcctcccgacggatgcgcgtgtccttactccgtcttggtgggtgggtggctgtgtatggcgtcccatctgtgcggggaggggggcaagtcggcacgtattcggacagactcaagcacacacgggggagcgctcttgtctcagggcaatgtttttattggtcaaactcaggcaaacagaaacgacatcttgtcgtcaaagggatacacaaacttccccccctcgccccatactcccgccagcaccccggtaaacaccaactcaatctcgcgcaggatttcgcgcaggtgatgagcgcagtccacgggggggagcacaaggggccgcgggtatagatcgacggggacgccgaccgactccccgcctccgggacagacacgcacgacgcgccgccagtagtgctctgcgtccagcaaggcgccgccgcggaaggcagtggggggcaaggggtcgctggcctcaaagggggacacccgaacgctccagtactccgcgtccaaccgtttattaaacgcgtccaagataaggcggtcgcaggcgtcctccataaggccccgggccgtgagtgcgtcctcctccggcacgcatgccgttgtcaggcccaggacccgtcgcagcgtgtcgcgtacgacccctgccgccgtggtgtacgcgggcccgcggagaggaaatcccccaagatggtcagtgttgtcgcgggagttccagaaccacactcccgcctggctccaggcgactgcgtgggtgtagacgccctcgagggccaggcacagtgggtgccgcagccggaggccgttggccctaagcacggctcccacggccgtctcgatggcccgccgggcgtcctcgatcaccccggaagccgcatccgcgtcttgggggtccacgttaaagacaccccagaacgcacccccatcgcccccgcagaccgcgaacttcaccgagctggccgtctcctcgatctgcaggcagacggcggccattaccccacccaggagctgccgcagcgcagggcaggcgttgcacgtgtccgggaccaggcgctccaagacggccccggcccagggctctgagggagcggccaccaccagcgcgtccagtcttgctaggcccgtccggccgtgggggtccgccagcccgctccccccgaggtcggccagggccgccaggagctgggcgcgaagtccggggaagcaaaaccgcgccgtccagacgggcccgacggccgcgggcgggtctaacagttggatgattttagtggcgggatgccaccgcgccaccgcctcccgcaccgcgggcaggaggcatccggctgccgccgaggccacgccgggccaggctcgcggggggaggacgaccctggcccccaccgcgggccaggcccccaggagcgcggcgtaagcggccgcggccccgcgcaccaggtcccgtgccgactcggccgtggccggcacggtgaacgtgggccaacccggaaaccccaggacggcaaagtacgggacgggtcccccccggacctcaaactcgggccccagaaaggcaaagacgggggccagggccccgggggcggcgtggaccgtggtatgccactgccggaaaagggcgacgagcgccggcgcggagaacttctcgccggcgcttacaaagtagtcgtaatcgcggggcagcagcacccgtgccgtgactcgttgcgggtgcccgcgtggccgcaggcccacctcgcacacctcgaccaggtccccgaacgcgccctccttcttgatcggcggaaacgcaagagtctggtattcgcgcgcaaatagcgcggttccggtggtgatgttaacggtcagcgaagcggcggacgcgcactggggggtgtcgcgaatggccgccaggcgcgcccacgccagccgcgcgtcgggatgctcggcaacgcgcgccgccagggccatagggtcgatgtcaatgttggcctccgcgaccaggagagcggcgcgaggggcggcgggcgggccccacgacgctctctcaactttcaccaccagtcccgtgcgtgggtccgagccgatacgcagcggggcgaacagggccaccggcccggtctggcgctccagggccgccaggacgcacgcgtacagcgcccgccacagagtcgggttctccaggggctccagcggggaggcggccggcgtcgtcgcggcgcgggcggccgccacgacggcctggacggagacgtccgcggagccgtagaaatcccgcagctccgtcgcggtgacggagacctccgcaaagcgcgcgcgaccctcccctgcggcgttgcgacatacaaaatacaccagggcgtggaagtactcgcgagcgcgggggggcagccataccgcgtaaagggtaatggcgctgacgctctcctccacccacacgatatctgcggtgtccatcgcacggcccctaaggatcacgggcggtctgtgggtcccatgctgccgtgcctggccgggcccggtgggtcgcggaaaccggtgacggggggggggcggtttttggggttggggtgggggtgggaaacggcccgggtccgggggccaacttggcccctcggtgcgttccggcaacagcgccgccggtccgcggacgaccacgtaccgaacgagtgcggtcccgagacttatagggtgctaaagttcaccgccccctgcatcatgggccaggcctcggtggggagctccgacagcgccgcctccaggatgatgtcagcgttggggttggcgctggatgagtgcgtgcgcaaacagcgcccccacgcgggcacgcgtagcttgaagcgcgcgcccgcaaactcccgcttgtgggccataagcagggcgtacagctgcctgtgggtccggcaggcgctgtggtcgatgtggtgggcgtccaacaaccccacgattgtctgtttggtgaggtttttaacgcgccccgccccgggaaacgtctgcgtgcttttggccatctgcacgccaaacagttcgccccagattatcttgaacagcgccaccgcgtggtccgtctcgctaacggacccgcgcgggggacagccgcttagggcgtcggcgacgcgcttgacggcttcctccgagagcagaagtccgtcggttacgttacagtggcccagttcgaacaccagctgcatgtagcggtcgtagtggggggtcagtaggtccagcacgtcatcggggccgaaggtcctcccagatcccccggccgccgagtcccaatgcaggcgcgcggccatggtgctgcacaggcacaacagctcccagacgggggttacgttcagggtggggggcagggccacgagctccagctctccggtgacgttgatcgtggggatgacgcccgtggcgtagtggtcatagatccgccgaaatatggcgctgctgcgggtggccatgggaacgcggagacaggcctccagcaacgccaggtaaataaaccgcgtgcgtcccatcaggctgttgaggttgcgcatgagcgcgacaatttccgccggcgcgacatcggaccggaggtatttttcgacgaaaagacccacctcctccgtctcggcggcctgggccggcagcgacgcctcgggatcccggcaccgcagctcccgtagatcgcgctgggccctgagggcgtcgaaatgtacgccccgcaaaaacagacagaagtcctttggggtcagggtatcgtcgtgtccccagaagcgcacgcgtatgcagtttagggtcagcagcatgtgaaggatgttaaggctgtccgagagacacgccagcgtgcatctctcaaagtagtgtttgtaacggaatttgttgtagatgcgcgacccccgccccagcgacgtgtcgcatgccgacgcgtcacagcgccccttgaaccggcgacacagcaggtttgtgacctgggagaactgcgcgggccactggccgcaggaactgaccacgtgattaaggagcatgggcgtaaagacgggctccgagcgcgccccggagccgtccatgtaaatcagtagctcccccttgcggagggtgcgcacccgtcccagggactggtacacggacaccatgtccggtccgtagttcatgggtttcacgtaggcgaacatgccatcaaagtgcaggggatcgaagctgaggcccacggttacgaccgtcgtgtatataaccacgcggtattggccccacgtggtcacgtccccgaggggggtgagcgagtgaagcaacagcacgcggtccgtaaactgacggcagaaccgggccacgatctccgcgaaggagaccgtcgacgaaaaaatgcagatgttatcgcccccgccaaggcgcgcttccagctccccaaagaacgtggccccccgggcgtccggagaggcgtccggagacgggccgctcggcggcccgggcgggcgcagggcagcctgcaggagctcggtccccagacgcgggagaaacaggcaccggcgcgccgaaaacccgggcatggcgtactcgccgaccaccacatgcacgtttttttcgccccggagaccgcacaggaagtccaccaactgcgcgttggcggttgcgtccatggcgatgatccgaggacaggtgcgcagcaggcgtagcattaacgcatccacgcggcccagttgctgcatcgttggcgaatagagctggcccagcgtcgacataacctcgtccagaacgaggacgtcgtagttgttcagaaggttggggcccacgcgatgaaggctttccacctggacgataagtcggtggaaggggcggtcgttcataatgtaattggtggatgagaagtaggtgacaaagtcgaccaggcctgactcagcgaaccgcgtcgctagggtctgggtaaaactccgacgacaggagacgacgagcacactcgtgtccggagagtggatcgcttcccgcagccagcggatcagcgcggtagtttttcccgaccccattggcgcgcggaccacagtcacgcacctggccgtcggggcgctcgcgttggggaaggtgacgggtccgtgctgctgccgctcgatcgttgttttcgggtgaacccggggcacccattcggccaaatcccccccgtacaacatccgcgctagcgatacgctcgacgtgtactgttcgcactcgtcgtccccaatgggacgcccggcccccagaggatctcccgactccgcgccccccacgaaaggcatgaccggggcgcggacggcgtggtgggtctggtgtgtgcaggtggcgacgtttgtggtctctgcggtctgcgtcacggggctcctcgtcctggcctctgtgttccgggcacggtttccctgcttttacgccacggcgagctcttatgccggggtgaactccacggccgaggtgcgcgggggtgtagccgtgcccctcaggttggacacgcagagccttgtgggcacttatgtaatcacggccgtgttgttgttggccgtggccgtgtatgccgtggtcggcgccgtgacctcccgctacgaccgcgccctggacgcgggccgccgtctggctgcggcccgcatggccatgccgcacgccacgctgatcgccggaaacgtctgctcttggttgctgcagatcaccgtcctgttgctggcccatcgcatcagccagctggcccacctggtttacgtcctgcactttgcgtgtctggtgtattttgcggcccatttttgcaccaggggggtcctgagcgggacgtatctgcgtcaggtgcacggcctgatggagctggccccgacccatcatcgcgtcgtcggcccggctcgcgccgtgctgacaaacgccttgctgttgggcgtcttcctgtgcacggccgacgccgcggtatccctgaataccatcgccgcgttcaactttaatttttcggccccgggcatgctcatctgcctgaccgtgctgttcgccattctcgtcgtatcgctgttgttggtggtcgagggggtgttgtgtcactacgtgcgcgtgttggtgggcccccacctgggggccgtggccgccacgggcatcgtcggcctggcctgcgagcactattacaccaacggctactacgttgtggagacgcagtggccgggggctcagacgggagtccgcgtcgccctcgccctggtcgccgcctttgccctcggcatggccgtgctccgctgcacccgcgcctatctgtatcacaggcggcaccacaccaaattttttatgcgcatgcgcgacacgcgacaccgcgcacattccgccctcaagcgcgtacgcagttccatgcgcggatcgcgagacggccgccacaggcccgcacccggcagcccgcccgggattcccgaatatgcggaagacccctacgcgatctcatacggcggccagctcgaccggtacggagattccgacggggagccgatttacgacgaggtggcggacgaccaaaccgacgtattgtacgccaagatacaacacccgcggcacctgcccgacgacgatcccatctatgacaccgttggggggtacgaccccgagcccgccgaggaccccgtgtacagcaccgtccgccgttggtagctgtttggttccgttttaataaaccgtttgtgtttaacccgaccgtggtgtatgtctggtgtgtggcgtccgatcccgttactatcaccgtccccccccccccctcaaccccggcgattgtgggttttttaaaaacgacacgcgtgcgaccgtatacagaacattgttttggtttttattcgctatcggacatggggggtggaaactgggtggcggggcaggcgcctccgggggtccgccggtgagtgtggcgcgagggggggtccgatgaacgcaggcgctgtctccccggggcccgcgtaaccccgcgcatatccgggggcacgtagaaattaccttcctcttcggactcgatatccacgacgtcaaagtcgtgggcggtcagcgagacgacctccccgtcgtcggtgatgaggacgttgtttcggcagcagcagggccgggccccggagaacgagaggcccatagctcggcgagcgtgtcgtcgaatgccaggcggctgcttcgctggatggccttatagatctccggatcgatgcggacgggggtaatgatcagggcgatcggaacggcctggttcgggagaatggacgccttgctgggtcctgcggccccgagagccccggcgccgtcctccaggcggaacgttacgccctcctccgcgctggtgcggtgcctgccgataaacgtcaccagatgcgggtggggggggcagtcggggaagtggctgtcgagcacgtagccctgcaccaagatctgcttaaagttcgggtgacgggggttcgcgaagacgggctcgcggcggaccagatccccggagctccaggacacgggggagatggtgtggcgtccgaggtcgggggcgccaaacagaagcacctccgagacaacgccgctatttaactccaccaaggcccgatccgcggcggagcaccgccttttttcgcccgaggcgtgggcctctgaccaggcctggtcttgcgtgacgagagcctcctccgggccggggacgcgcccgggcgcgaagtatcgcacgctgggcttcgggatcgaccggataaatgcccggaacgcctccggggaccggtgtgccatcaagtcctcgtacgcggaggccgtggggtcgctggggtccatggggtcgaaagcgtacttggcccggcatttgacctcgtaaaaggccaggggggtcttggggactggggccaggtagccgtgaatgtcccgaggacagacgagaatatccagggacgccccgaccatccccgtgtgaccgtccatgaggaccccacacgtatgcacgttctcttcggcgaggtcgctgggttcgtggaagataaagcgccgcgtgtcggcgccggcctcgccgccgtcgtccgcgcggcccacgcagtagcgaaacagcaggcttcgggccgtcggctcgttcacccgcccgaacatcaccgccgaagactgtacatccggccgcaggctggcgttgtgcttcagccactggggcgagaaacacggaccctgggggccccagcggagggtggatgcggtcgtgaggccccgccggagcagggcccatagctggcagtcggcctggttttgcgtggccgcctcgtaaaaccccatgaggggccggggcgccacggcgtccgcggcggccgggggcccgcggcgcgtcaggcgccataggtgccgaccgagtccgcggtccaccatacccgcctcctcgaggaccacggccagggaacacagataatccaggcgggcccagaggggaccgatggccagaggggcgcggacgccgcgcagcaacccgcgcaggtggcgctcgaacgtctcggctagtatatgggagggcagcgcgttggggatcaccgacgccgaccacatagagtcaaggtccggggagtcgggatcggcgtccgggtcgcgggcgtgggtgcccccaggagatagcggaatgtctggggtcggaggccctgaggcgtcagaaagtgccggcgacgcggcccggggcttttcgtctgcggtgtcggtggcgtgctgatcacgtggggggttaacgggcgaatgggagctcgggtccacagctgacgtcgtctggggtggggggggcaggggacggaaggtggttgtcagcggaagactgttagggcgggggcgcttgggggggctgtcggggccacgaggggtgtcctcggccagggcccagggacgcttagtcacggtgcgtcccggcggacatgctgggcctaccgtggactccatttccgagacgacgtggggggagcggtggttgagcgcgccgccgggtgaacgctgattctcacgacagcgcgtgccgcgcgcacgggttggtgtgacacaggcgggacaccagcaccaggagaggcttaagctcgggaggcagcgccaccgacgacagtatcgccttgtgtgtgtgctggtaatttatacaccgatccgtaaacgcgcgccgaatcttgggattgcggaggtggcgccggatgccctctgggacgtcatacgccaggccgtgggtgttggtctcggccgagttgacaaacagggctgggtgcagcacgcagcgataggcgagcagggccagggcgaagtccggcgacagctggttgttaaaatactggtaaccgggaaaccgggtcacgggtacgcccaggctcggggcgacgtacacgctaaccaccaactccagcagcgtctggcccagggcgtacaggtcaaccgctaacccgacgtcgtgcttcaggcggtggttggtaaattcggcccgttcgttgttaaggtatttcaccaacagctccgggggctggttatacccgtgacccaccagggtgtgaaagttggctgtggttagggcggtgggcatgccaaacatccggggggacttgaggtccggctcctggaggcaaaactgcccccgggcgatcgtggagttggagttgagggtgacgaggctaaagtcggcgaggacggcccgccggagcgagacggcgtccgaccgcagcatgacgaggatgttggcgcacttgatatccaggtggctgatcccgcaggtggtgtttaaaaacacaacggcgcgggccagctccgtgaagcactggtggagggccgtcgagaccgaggggtttgttgtgcgcagggacgccagttggccgatatacttaccgaggtccatgtcgtacgcggggaacactatctgtcgttgttgcagcgagaacccgaggggcgcgatgaagccgcggatgttgtgggtgcggccggcgcgtagaacgcactccccgaccaacagggtcgcgatgagctcaacggcaaaccactccttttcctttatggtcttaacggcaagcttatgttcgcgaatcagttggacgtcaccgtatcccccagaccccccgaagcttcgggccccggggatctcgagggtcgtgtagtgtagggcggggttgatggcgaacacggggctgcatagcttgcggatgcgcgtgagggtgaggatgtgcgagggggacgaggggggtgcggttaacgccgcctgggatctgcgcaggggcgggcggttcagtttggccgccgtaccgggcgtctcgggggacgcgcggcgatgagacgagcggctcattcgccatcgggatagtcccgcgcgaagccgctcgcggaggccggatcggtggcgggacccgtgggaggagcgggagacggcggcgtcctggagagaggggccgctggggcgcccggaggccccgtgggggttggagtgtacgtaggatgcgagccaatccttgaaggaccgttggcgtgcaccttgggggctgaggttagctgccacatgaccagcaggtcgctgtctgcgggactcatccatccttcggccaggtcgccgtctccccacagagaagcgttggtcgctgcttcctcgagttgctcctcctggtccgcaagacgatcgtccacggcgtccaggcgctcaccaagcgccggatcgaggtaccgtcggtgtgcggttagaaagtcacgacgcgccgcttgctcctccacgcgaattttaacacaggtcgcgcgctgtcgcatcatctctaagcgcgcgcgggactttagccgcgcctccaattccaagtgggccgcctttgcagccataaaggcgccaacaaaccgaggatcttgggtgctgacgccctcccggtgcagctgcagggtctggtccttgtaaatctcggctcggaggtgcgtctcggccaggcgtcggcgcagggccgcgtgggcggcatctcggtccattccgccaccctgcgggcgacccggggggtgctctgatagtctcgcgtgcccaaggcccgtgatcggggtacttcgccgccgcgacccgccacccggtgtgcgcgatgtttggtcagcagctggcgtccgacgtccagcagtacctggagcgcctcgagaaacagaggcaacttaaggtgggcgcggacgaggcgtcggcgggcctcaccatgggcggcgatgccctacgagtgccctttttagatttcgcgaccgcgacccccaagcgccaccagaccgtggtccctggcgtcgggacgctccacgactgctgcgagcactcgccgctcttctcggccgtggcgcggcggctgctgtttaatagcctggtgccggcgcaactaaaggggcgtgatttcgggggcgaccacacggccaagctggaattcctggcccccgagttggtacgggcggtggcgcgactgcggtttaaggagtgcgcgccggcggacgtggtgcctcagcgtaacgcctactatagcgttctgaatacgtttcaggccctccaccgctccgaagcctttcgccagctggtgcactttgtgcgggactttgcccagctgctcaaaacctccttccgggcctccagcctcacggagaccacgggcccccccaaaaaacgggccaaggtggacgtggccacccacggccggacgtacggcacgctggagctgttccaaaaaatgatccttatgcacgccacctactttctggccgccgtgctcctcggggaccacgcggagcaggtcaacacgttcctgcgtctcgtgtttgagatccccctgtttagcgacgcggccgtgcgccacttccgccagcgcgccaccgtgtttctcgtcccccggcgccacggcaagacctggtttctggtgcccctcatcgcgctgtcgctggcctcctttcgggggatcaagatcggctacacggcgcacatccgcaaggcgaccgagccggtgtttgaggagatcgacgcctgcctgcggggctggttcggttcggcccgagtggaccacgttaaaggggaaaccatctccttctcgtttccggacgggtcgcgcagtaccatcgtgtttgcctccagccacaacacaaacgtaagtcctcttttctttcgcatggctctcccaaggggccccgggtcgacccgacccacacccacccacccacatacacacacaaccagacgcgggaggaaagtctgccccgtgggcactgatttttattcgggatcgcttgaggaggcccgggcaacggcccgggcaacggtggggcaactcgtagcaaataggcgactgatgtacgaagagaagacacacaggcgccacccggcgctggtcggggggatgttgtccgcgccgcaccgtcccccgacgacctcttgcagacggtccgtgatgcaaggacggcggggggcctgcagcagggtgaccgtatccacgggatggccaaagagaagcggacacaggctagcatccccctggaccgccagggtacactgggccatcttggcccacagacacggggcgacgcagggacaggactccgttacgacggaggagagccacagtgcgttggcggaatcgatgtggggcggcggggcgcaggactcgcagccccccgggtggttggtgatcctggccaggagccatcccagatggcgggccctgcttcccggtggacagagcgaccccaggtcgctgtccatggcccagcagtagatctggccgctggggaggtgccaccaggcccccgggcccaaggcgcagcacgcgcccggctccgggggggtcttcgcggggaccagatacgcgccatccagctcgccgaccactggctcctccgcgagctgttcggtggttgggtcgggggtttcctccgggggggtggccgcccgtatgcgtgcgaacgtgagggtgcacaggagcggggtcagggggtgcgtcacgctccggaggtggacgatcgcgcagtagcggcgctcgcggttaaagaaaaagagggcaaagaaggtgttcgggggcaaccgcagcgccttggggcgcgtcagatacagaaaaatctcgcagaagagggcgcgcccggggtctgggttaggaagggccacctgacacagaggctcggtgaggaccgttagacaccgaaagatcttgagccgctcgtccgcccgaacgacgcgccacacaaagacggagttgacaatgcgcgcgatagagtcgacgtccgtccccaggtcgtcgactctatcgcgcgtgccgcgagctccggcccgggaatccggccggggcaaggtccccgggggaccaggcggcgccaggggccgccggggtcccagctgcgccatgccgggggcggggggagggcaaaccccagaggcgggggccaacggcgcggggaggagtgggtgggcgaggtggccgggggaaggcgcccgctagcgagaccggccgttcccggacgacaccttgcgacaaaacctaaggacagcggcccgcgcgacggggtccgagaggctaaggtaggccgcgatgttaatggtgaacgcaaagccgccgggaaagacaactatgccacagaggcggcgattaaaccccaggcagaggtaggcgtagctttccccgggcaggtattgctcgcagaccctgcgtggggctgtggaggggacggcctccatgaagcgacatttactctgctcgcgtttactgacgtcaccatccatcgccacggcgattggacgattgttaagccgcagcgtgtctccgcttgtgctgtagtagtcaaaaacgtaatggccgtcggagtcggcaaagcgggccgggaggtcgtcgccgagcgggacgacccgccgcccccgaccgccccgtccccccaggtgtgccaggacggccagggcatacgcggtgtgaaaaaaggcgtcgggggcggtcccctcgacggcgcgcatcaggttctcgaggagaatggggaagcgcctggtcacctcccccaaccacgcgcgttggtcggggccaaagtcatagcgcaggcgctgtgagattcgcgggccgccctgaagcgcggcccggatggcctggcccagggcccggaggcacgccagatgtatgcgcgcggtaaaggcgacctcggcggcgatgtcaaagggcggcaggacggggcgcgggtggcgcaggggcacctcgagcgcgggaaagcgtagcagcagctccgcctgcccagcgggagacagctggtgggggcgcacgacgcgttctgcggcgcaggcctcggtcagggccgtggccagcgccgaggacagcagcggagggcgggcgcgtcgcccgccccacgccacggagttctcgtaggagacgacgacgaagcgctgcttggttccgtagtggtggcgcaggaccacggagatagaacgacggctccacagccagtccggccggtcgccgccggccagggcttcccatccgcgatccaaccactcgaccagcgaccgcggctttgcggtaccaggggtaagggttagaacgtcgttcaggatgtcctcgcccccgggcccgtggggcgctggggccacaaagcggcccccgccggggggctccagacccgccagcaccgcatctgcgtcagccgcccccatggcgcccccgctgacggcctggtgaaccagggcgccctggcgtagccccgatgcaacgccacaggccgcacgcccggtccgcgctcggaccgggtggcggcgggtgacgtcctgcactgcccgctgaaccaacgcgaggatctcctcgttctcctgtgcgatggacacgtcctgggccgcggtcgtgtcgccgccgggggccgtcagctgctcctccggggagatgggggggtcggacgccccgacgatgggcgggtctgcgggcgcccccgcgtggggccgggccaagggctgcggacgcggggacgcgctttcccccagacccatggacaggtgggccgcagcctccttcgcggccggcggggcggcggcgccaagcagagcgacgtagcggcacaaatgccgacagacgcgcatgatgcgcgtgctgtcggccgcgtagcgcgtgttgggggggacgagctcgtcgtaactaaacagaatcacgcgggcacagctcgcccccgagccccacgcaaggcgcagcgccgccacggcgtacgggtcatagacgccctgcgcgtcacacaccacgggcagggagacgaacaaccccccggcgctggacgcacgcggaaggaggccagggtgtgccggcacgacgggggccagaagctcccccaccgcatccgcgggcacgtaggcggcaaacgccgtgcaccacggggtacagtcgccggtggcatgagcccgagtctggatttcgacctggaagtttgcggccgtcccgagtccggggcggccgcgcatcagggcggccagagggattcccgcggccgccaggcactcgctggatatgatgacgtgaaccaaagacgagggccgacccgggccgtggccgagatcgtactggacctcgttggccaagtgcgcgttcatggttcgggggtgggtgtgggtgtgtaggcgatgcgggtcccccgagtccgcgggaagggcgtgggtttggcgcgcgtatgcgtattcgccaacggaggcgtgcgtgcttatgcgcggcgcgtttcttctgtctctagggaatccgaggccaggactttaacctgctctttgtcgacgaggccaactttattcgcccggatgcggtccagacgattatgggctttctcaaccaggccaactgcaagattatcttcgtgtcgtccaccaacaccgggaaggccagtacgagctttttgtacaacctccgcggggccgcagacgagcttctcaacgtggtgacctatatatgcgatgatcacatgccgagggtggtgacgcacacaaacgccacggcctgttcttgttatatcctcaacaagcccgttttcatcacgatggacggggcggttcgccggaccgccgatttgtttctggccgattccttcatgcaggagatcatcgggggccaggccagggagaccggcgacgaccggcccgttctgaccaagtctgcgggggagcggtttctgttgtaccgcccctcgaccaccaccaacagcggcctcatggcccccgatttgtacgtgtacgtggatcccgcgttcacggccaacacccgagcctccgggaccggcgtcgctgtcgtcgggcggtaccgcgacgattatatcatcttcgccctggagcacttttttctccgcgcgctcacgggctcggcccccgccgacatcgcccgctgcgtcgtccacagtctgacgcaggtcctggccctgcatcccggggcgtttcgcggcgtccgggtggcggtcgagggaaatagcagccaggactcggccgtcgccatcgccacgcacgtgcacacagagatgcaccgcctactggcctcggagggggccgacgcgggctcgggccccgagcttctcttctaccactgcgagcctcccgggagcgcggtgctgtacccctttttcctgctcaacaaacagaagacgcccgcctttgaacactttattaaaaagtttaactccgggggcgtcatggcctcccaggagatcgtttccgcgacggtgcgcctgcagaccgacccggtcgagtatctgctcgagcagctaaataacctcaccgaaaccgtctcccccaacactgacgtccgtacgtattccggaaaacggaacggcgcctcggatgaccttatggtcgccgtcattatggccatctacctcgcggcccaggccggacctccgcacacattcgctcctatcacacgcgtctcgtgagcgcccaataaacacacccaggtatgctacgcacgaccacggtgtcgtctgttaaggggggggggggaagggggtgttggcgggaagcgtgggaacacgggggattctctcacgaccggcaccagtaccacccccctgtgaacacagaaaccccaacccaaatcccataaacatacgacacacaggcatattttggaatttcttaggtttttatttatttaggtatgctggggtttctccctggatgcccacccccacccccccgtgggtctagccgggccttagggatagcgtataacgggggccatgtctccggaccgcacaacggccgcgccgtcaaaggtgcacacccgaaccacgggagccagggccaaggtgtctcctagttggcccgcgtgggtcagccaggcgacgagcgcctcgtaaagcggcagccttcgctctccatcctgcatcagggccggggcttcggggtgaatgagctgggcggcctcccgcgtgacactctgcatctgcagtagagcgttcacgtacccgtcctgggcacttagcgcaaagagccgggggattagcgtaaggatgatggtggttccctccgtgatcgagtaaaccatgttaaggaccagcgatcgcagctcggcgtttacgggaccgagttgttggacgtccgccagcagcgagaggcgactcccgttgtagtacagcacgttgaggtctggcagccctccggggtttctggggctggggttcaggtcccggatgcccctggccacgagccgcgccacgatttcgcgcgccaggggcgatggaagcggaacgggaaaccgcaacgtgaggtccagcgaatccaggcgcacgtccgtcgcttggccctcgaacacgggcgggacgaggctgatggggtccccgttacagagatctacgggggaggtgttgcgaaggttaacggtgccggcgtgggtgaggcccacgtccagggggcaggcgacgattcgcgtgggaagcacccgggtgatgaccgcggggaagcgccttcggtacgccagcaacaaccccaacgtgtcgggactgacgcctccggagacgaaggattcgtgcgccacgtcggccagcgtcagttgccggcggatggtcggcaggaataccacccgcccttcgcagcgctgcagcgccgccgcatcggggcgcgagatgcccgagggtatcgcgatgtcagtttcaaagccgtccgccagcatggcgccgatccacgcggcagggagtgcagtggtggttcgggtggcgggaggagcgcggtgggggtcagcggcgtagcagagacgggcgaccaacctcgcataggacggggggtgggtcttagggggttgggaggcgacagggaccccagagcatgcgcggggaggtctgtcgggcccagacgcaccgagagcgaatccgtccgcggagtcccggcttgggttttatggggcccggccctcggaatcgcggcttgtcggcggggacaaagggggcggggctaggggcttgcggaaacagaagacgcgtgggataaaagaatcgcactaccccaaggaagggcggggcggtttattacagagccagtcccttgagcggggatgcgtcatagacgagatactgcgcgaagtgggtctcccgcgcgtgggcttccccgttgcgggcactgcggaggagggcggggtcgctggcgcaggtgagcgggtaggcctcctgaaacaggccacacgggtcctccacgagttcgcggcaccccggggggcgcttaaactgtacgtcgctggcggcggtggccgtggacaccgccgaacccgtctccacgatcaggcgctccaggcagcgatgtttggcggcgatgtcggccgacgtaaagaacttaaagcaggggctgagcaccggcgaggccccgttgaggtggtaggccccgttatagagcaggtccccgtacgaaaatcgctgcgacgcccacgggttggccgtggccgcgaaggcccgggacgggtcgctctggccgtggtcgtacatgagggcggtgacatccccctccttgtcccccgcgtaaacgcccccggcggcgcgtccccgggggttgcagggccggcggaagtagttgacgtcggtcgacacgggggtggcgataaactcacacacggcgtcctggccgtggtccatccctgcgcgccgcggcacctgggcgcacccgaacacggggacgggctgggccggccccaggcggtttcccgccacgaccgcgttccgcaggtacacggctgccgcgttgtccaggagagggggagccccgcggcccaggtaaaagttttggggaaggttgcccatgtcggtgacggggttgcggacggttgccgtggccacgacggcggtgtagcccacgcccaggtccacgttcccgcgcggctgggtgagcgtgaagtttacccccccgccagtttcgtgccgggccacctggagctggcccaggaagtacgcctccgacgcgcgctccgagaacagcacgttctcagtcacaaagcggtcctgtcggacgacggtgaacccaaacccgggatggaggcccgtcttgagctgatgatgcaaggccacgggactgatcttgaagtaccccgccatgagcgcgtaggtcagcgcgttctccccggccgcgctctcgcggacgtgctgcacgacgggctgtcggatcgacgaaaagtagttggcccccagagccggggggaccagggggacctgccgcgacaggtcgcgcagggccggggggaaattgggcgcgttcgccacgtggtcggccccggcgaacagcgcgtggacggggagggggtaaaaatagtcgccattttggatggtatggtccagatgctggggggccatcagcaggattccggcgtgcaacgccccgtcgaatatgcgcatgttggtggtggacgcggtgttggcgcccgcgtcgggcgccgccgagcagagcagcgccgttgtgcgttcggccatgttgtgggccagcacctgcagcgtgagcatggcgggcccgtccactaccacgcgcccgttgtgaaacatggcgttgaccgtgttggccaccagattggccgggtgcagggggtgcgcggggtccgtcacggggtcgctggggcactcctcgccgggggcgatctccgggaccaccatgttctgcagggtggcgtatacgcggtcgaagcgaacccccgcggtgcagcagcggccccgcgagaaggcgggcaccatcacgtagtagtaaatcttgtggtgcacggtccagtccgccccccggtgcggccggtcatccgcggcgtccgcggctcgggcctgggtgttgtgcagcagctggccgtcgttgcggttgaagtccgcggtcgccacgttacatgccgccgcgtacacggggtcgtggccccccgcgctaacccggcagtcgcgatggcggtccagggccgcgcgccgcatcagggcgtcacagtcccacacgaggggtggcagcagcgccgggtctcgcattaggtgattcagctcggcttgcgcctgcccgcccagctccgggccggtcagggtaaagtcatcaaccagctgggccagggcctcgacgtgcgccaccaggtcccggtacacggccatgcactcctcgggaaggtctcccccgaggtaggtcacgacgtacgagaccagcgagtagtcgttcacgaacgccgcgcaccgcgtgttgttccagtagctggtgatgcactggaccacgagccgggccagggcgcagaagacgtgctcgctgccgtgtatggcggcctgcagcaggtaaaacaccgccgggtagttgcggtcgtcgaacgccccgcgaacggcggcgatggtggcgggggccatggcgtggcgtcccacccccagctccaggccccgggcgtcccggaacgccgccggacatagcgccaggggcaagttgccgttcaccacgcgccaggtggcctggatctcccccgggccggccgggggaacgtccccccccggcagctccacgtcggccacccccacaaagaagtcgaacgcggggtgcagctcaagagccaggttggcgttgtcgggctgcataaactgctccggggtcatctggccttccgcgacccatcggacccgcccgtgggccaggcgctgcccccaggcgttcaaaaacagctgctgcatgtctgcggcggggccggccggggccgccacgtacgccccgtacggattggcggcttcgacggggtcgcggttaaggcccccgaccgccgcgtcaacgttcatcagcgaagggtggcacacggtcccgatcgcgtgttccagagacaggcgcagcacctggcggtccttcccccaaaaaaacagctggcggggcgggaaggcgcggggatccgggtggccgggggcggggactaggtccccggcgtgcgcggcaaaccgttccatgaccggattgaacaggcccaggggcaggacgaacgtcaggtccatggcgcccaccagggggtagggaacgttggtggcggcgtagatgcgcttctccagggcctccagaaagaccagcttctcgccgatggacaccagatccgcgcgcacgcgcgtcgtctggggggcgctctcgagctcgtccagcgtctgccggttcaggtcgagctgctcctcctgcatctccagcaggtggcggcccacgtcgtccagacttcgcacggccttgcccatcacgagcgccgtgaccaggttggccccgttcaggaccatctcgccgtacgtcaccggcacgtcggcttcggtgtcctccactttcaggaaggactgcaggaggcgctgtttgatcggggcggtggtgacgagcaccccgtcgaccggccgcccgcgcgtgtcggcatgcgtcagacggggcacggccacggagggctgcgtggccgtggtgaggtccacgagccaggcctcgacggcctcccggcggtggcccgccttgcccaggaaaaagctcgtctcgcagaagcttcgctttagctcggcgaccagggtcgcccgggccaccctggtggccaggcggccgttgtccaggtatcgttgcatcggcaacaacaaagccaggggcggcgccttttccagcagcacgtgcagcatctggtcggccgtgccgcgctcaaacgccccgaggacggcctggacgttgcgagcgagctgttggatggcgcgcaactggcgatgcgcgccgatacccgtcccgtccagggcctcccccgtgagcagggcgatggcctcggtggccaggctgaaggcggcgttcagggcccggcggtcgataatcttggtcatgtaattgtgtgtgggttgctcgatggggtgcgggccgtcgcgggcaatcagcggctggtggacctcgaactgtacgcgcccctcgttcatgtaggccagctccggaaacttggtacacacgcacgccaccgacaacccgagctccagaaagcgcacgagcgacagggtgttgcaatacgaccccagcagggcgtcgaactcgacgtcgtacaggctgtttgcatcggagcgcacgcgggaaaaaaaatcaaacaggcgtcgatgcgacgccacctcgatcgtgctaaggagggacccggtcggcaccatggccgcggcataccggtatcccggagggtcgcggttgggagcggccatggggtcgcgtggagatcggctgtctctagcgatattggcccggggaggctaagatccaccccaacgcccggccacccgtgtacgtgcccgacggcccaaggtccaccgaaagacacgacgggcccggacccaaaaaggcgggggatgctgtgtgagaggccgggtgccggtcgggggggaaaggcaccgggagaaggctgcggcctcgttccaggagaacccagtgtccccaacagacccggggacgtgggatcccaggccttatatacccccccccccgccccacccccgttagaacgcgacgggtgcattcaagatggccctggtccaaaagcgtgccaggaagaaattggcagaggcggcaaagctgtccgccgccgccacccacatcgaggccccggccgcgcaggctatccccagggcccgtgtgcgcaggggatcggtgggcggcagcatttggttggtggcgataaagtggaaaagcccgtccggactgaaggtctcgtgggcggcggcgaacaaggcacacagggccgtgcctcccaaaaacacggacatcccccaaaacacgggcgccgacaacggcagacgatccctcttgatgttaacgtacaggaggagcgcccgcaccgcccacgtaacgtagtagccgacgatggcggccaggatacaggccggcgccaccacccttccggtcagcccgtaatacatgcccgctgccaccatctccaacggcttcaggaccaaaaacgaccaaaggaacagaatcacgcgctttgaaaagaccggctgggtatggggcggaagacgcgagtatgccgaactgacaaaaaaatcagaggtgccgtacgaggacaatgaaaactgttcctccagcggcagttctccctcctcccccccgaaggcggcctcgtcgaccagatctcgatccaccagaggaaggtcatcccgcatggtcatggggtgtgcggtggaggtggggagaccgaaaccgcaaagggtcgcttacgtcagcaggatcccgagatcaaagacacccgggttcttgcacaaacaccacccgggttgcatccgcggaggcgagtgttttgataaggccgttccgcgccttgatataacctttgatgttgaccacaaaacccggaatttacgcctacgccccaatgcccacgcaagatgaggtaggtaacccccccgtgggtgtgacgttgcgtttagttcattggaggccaaggggaaaaatggggtggggaggaaacggaaaacccagtaggccgtgtcgggaacacgcccggggttgtcctcaaaaggcagggtccatactacggaagccgtcgttgtattcgagacctgcctgtgcaacgcacgtcggggttgcctgtgtccggttcggcccccaccgcgtgcggcacgcacgaggacgagtccgcgtgctttattggcgttccaagcgttgccctccagtttctgttgtcggtgttcccccatacccacgcccacatccaccgtagggggcctctgggccgtgttacgtcgccgcccgcgatggagcttagctacgccaccaccatgcactaccgggacgttgtgttttacgtcacaacggaccgaaaccgggcctactttgtgtgcggggggtgtgtttattccgtggggcggccgtgtgcctcgcagcccggggagattgccaagtttggtctggtcgttcgagggacaggcccagacgaccgcgtggtcgccaactatgtacgaagcgagctccgacaacgcggcctgcaggacgtgcgtcccattggggaggacgaggtgtttctggacagcgtgtgtcttctaaacccgaacgtgagctccgagctggatgtgattaacacgaacgacgtggaagtgctggacgaatgtctggccgagtactgcacctcgctgcgaaccagcccgggtgtgctaatatccgggctgcgcgtgcgggcgcaggacagaatcatcgagttgtttgaacacccaacgatagtcaacgtttcctcgcactttgtgtataccccgtccccatacgtgttcgccctggcccaggcgcacctcccccggctcccgagctcgctggaggccctggtgagcggcctgtttgacggcatccccgccccacgccagccacttgacgcccacaacccgcgcacggatgtggttatcacgggccgccgcgccccacgacccatcgccgggtcgggggcggggtcggggggcgcgggcgccaagcgggccaccgtcagcgagttcgtgcaagtcaaacacattgaccgcgtgggccccgctggcgtttcgccggcgcctccgccaaacaacaccgactcgagttccctggtgcccggggcccaggattccgccccgcccggccccacgctaagggagctgtggtgggtgttttatgccgcagaccgggcgctggaggagccccgcgccgactctggcctcacccgcgaggaggtacgtgccgtacgtgggttccgggagcaggcgtggaaactgtttggctccgcgggggccccgcgggcgtttatcggggccgcgttgggcctgagccccctccaaaagctagccgtttactactatatcatccaccgagagaggcgcctgtcccccttccccgcgctagtccggctcgtaggccggtacacacagcgccacggcctgtacgtccctcggcccgacgacccagtcttggccgatgccatcaacgggctgtttcgcgacgcgctggcggccggaaccacagccgagcagctcctcatgttcgaccttctccccccaaaggacgtgccggtgggaagcgacgtgcaggccgacagcaccgctctgctgcgctttatagaatcgcaacgtctcgccgtccccgggggggtgatctcccccgagcacgtcgcgtaccttggtgcgttcctgagcgtgctgtacgctggccgcgggcgcatgtccgcagccacgcacaccgcgcggctgacaggggtgacctccctggtgctagcggtgggtgacgtggaccgtctttccgcgtttgaccgcggagcggcgggcgcggccagccgcacgcgggccgccgggtacctggatgtgcttcttaccgttcgtctcgctcgctcccaacacggacagtctgtgtaaaagaccccaataaacgtatatcgctactacacccttgtgtgtcaatggacgcctctccgggggggggggagggaaagcaaagaggggctgggggagcggcaccaccggggcctgaacaaacaaaccacagacacggttacagtttattcggtcgggcggagaaacggccgaagccacgcccactttattcgcgtctccaaaaaaacgggacacttgtccggagaacctttaggatgccagccagggcggcggtaatcataaccacgcccagcgcagaggcggccagaaacccgggcgcaattgcggccacgggctgcgtgtcaaaggctagcaaatgaatgacggttccgtttggaaatagcaacaaggccgtggacggcacgtcgctcgaaaacacgcttggggcgccctccgtcggcccggcggcgatttgctgctgtgtgttgtccgtatccaccagcaacacagacatgacctccccggccggggtgtagcgcataaacacggcccccacgagccccaggtcgcgctggttttgggtgcgcaccagccgcttggactcgatatcccgggtggagccttcgcatgtcgcggtgaggtaggttaggaacagtgggcgtcggacgtcgacgccggtgagcttgtagccgatcccccggggcagaggggagtgggtgacgacgtagctggcgttgtgggtgatgggtaccaggatccgtggctcgacgttggcagactgccccccgcaccgatgtgaggcctcagggacgaaggcgcggatcagggcgttgtagtgtgcccaacgcgtcagggtcgaggcgaggccgtgggtctgctgggccaggacttcgaccggggtctcggatcgggtggcttgagccagcgcgtccaggataaacacgctctcgtctagatcaaagcgcagggaggccgcgcatggcgaaaagtggtccggaagccaaaagagggttttctggtggtcggcccgggccagcgcggtccggaggtcggcgttggtcgctgcggcgacgtcggacgtacacagggccgaggctatcagaaggctccggcgggcgcgttcccgctgcaccgccgaggggacgccagccaagaacggctgccggaggacagccgaggcgtaaaatagcgcccggtggacgaccggggtggtcagcacgcggccccctagaaactcggcatacagggcgtcgatgagatgggctgcgctgggcgccactgcgtcgtacgccgaggggctatccagcacgaaggccagctgatagcccagcgcgtgtaatgccaagctctgttcgcgctccagaatctcggccaccaggtgctggagccgagcctctagctgcaggcgggccgtgggatccaagactgacacattaaaaaacacagaatccgcggcacagcccgcggccccgcgggcggccaacccggcaagcgcgcgcgagtgggccaaaaagcctagcaggtcggagaggcagaccgcgccgtttgcgtgggcggcgttcacgaaagcaaaacccgacgtcgcgagcagccccgttaggcgccagaagagaggggggcgcgggccctgctcggcgcccgcgtcccccgagaaaaactccgcgtatgcccgcgacaggaactgggcgtagttcgtgccctcctccgggtagccgcccacgcggcggagggcgtccagcgcggagccgttgtcggcccgcgtcagggaccctaggacaaagacccgataccgggggccgcccgggggcccgggaagagcccccggggggttttcgtccgcggggtccccgacccgatctagcgtctggcccgcggggaccaccatcacttccaccggagggctgtcgtgcatggatatcacgagccccatgaattcccgcccgtagcgcgcgcgcaccagcgcggcatcgcacccgagcaccagctcccccgtcgtccagatgcccacgggccacgtcgaggccgacggggagaaatacacgtacctacctggggatctcaacaggccccgggtggccaaccaggtcgtggacgcgttgtgcaggtgcgtgatgtccagctccgtcgtcgggtgccgccgggccccaaccggcggtcgggggggcggtgtatcacgcggcccgctcgggtggctcgccgtcgccacgttgtctccccgcgggaacgtcagggcctcggggtcagggacggccgaaaacgttacccaggcccgggaacgcagcaacacggaggcggctggattgtgcaagagacccttaaggggggcgaccgaggggggaggctgggcggtcggctcgaccgtggtgggggcgggcaggctcgcgttcgggggccggccgagcaggtaggtcttcgggatgtaaagcagctggccggggtcccgcggaaactcggccgtggtgaccaatacaaaacaaaagcgctcctcgtaccagcgaagaaggggcagagatgccgtagtcaggtttagttcgtccggcggcgccagaaatccgcgcggtggtttttgggggtcgggggtgtttggcagccacagacgcccggtgttcgtgtcgcgccagtacatgcggtccatgcccaggccatccaaaaaccatgggtctgtctgctcagtccagtcgtggacctgaccccacgcaacgcccaaaataataacccccacgaaccataaaccattccccatgggggaccccgtccctaacccacggggcccgtggctatggcagggcttgccgccccgacgttggctgcgagccctgggccttcacccgaacttgggggttggggtggggaaaaggaagaaacgcgggcgtattggtcccaatggggtctcggtggggtatcgacagagtgccagccctgggaccgaaccccgcgtttatgaacaaacgacccaacacccgtgcgttttattctgtctttttattgccgtcatagcgcgggttccttccggtattgtctccttccgtgtttcagttagcctcccccatctcccgggcaaacgtgcgcgccaggtcgcagatcgtcggtatggagcctggggtggtgacgtgggtctggaccatcccggaggtaagttgcagcagggcgtcccggcagccggcgggcgattggtcgtaatccaggataaagacgtgcatgggacggaggcgtttggccaagacgtccaaagcccaggcaaacacgttatacaggtcgccgttgggggccagcaactcgggggcccgaaacagggtaaataacgtgtccccgatatggggtcgtgggcccgcgttgctctggggctcggcaccctggggcggcacggccgcccccgaaagctgtccccaatcctcccgccacgacccgccgccctgcagataccgcaccgtattggcaagcagcccataaacgcggcgaatcgcggccagcatagccaggtcaagccgctcgccggggcgctggcgtttggccaggcggtcgatgtgtctgtcctccggaagggcccccaacacgatgtttgtgccgggcaaggtcggcgggatgagggccacgaacgccagcacggcctggggggtcatgctgcccataaggtatcgcgcggccgggtagcacaggagggcggcgatgggatggcggtcgaagatgagggtgagggccgggggcggggcatgtgagctcccagcctcccccccgatatgaggagccagaacggcgtcggtcacggcataaggcatgcccattgttatctgggcgcttgtcattaccaccgccgcgtccccggccgatatctcaccctggtcgaggcggtgttgtgtggtgtagatgttcgcgattgtctcggaagcccccaacacccgccagtaagtcatcggctcgggtacgtagacgatatcgtcgcgcgaacccagggccaccagcagttgcgtggtggtggttttccccatcccgtggggaccgtctatataaacccgcagtagcgtgggcattttctgctccaggcggacttccgtggctttttgctgccggcgagggcgcaacgccgtacgtcggttgttatggccgcgagaacgcgcagcctggtcgaacgcagacgcgtgttgatggcaggggtacgaagccatacgcgcttctacaaggcgctggccgaagaggtgcgggagtttcacgccaccaagatctgcggcacgctgttgacgctgttaagcgggtcgctgcagggtcgctcggtattcgaggccacacgcgtcaccttaatatgcgaagtggacctgggaccgcgccgccccgactgcatctgcgtgttcgaattcgccaatgacaagacgctgggcggggtttgtgtcatcatagaactaaagacatgcaaatatatttcttccggggacaccgccagcaaacgcgagcaacgggccacggggatgaagcagctgcgccactccctgaagctcctgcagtccctcgcgcctccgggtgacaagatagtgtacctgtgccccgtcctggtgtttgtcgcccaacggacgctccgcgtcagccgcgtgacccggctcgtcccgcagaaggtctccggtaatatcaccgcagtcgtgcggatgctccagagcctgtccacgtatacggtccccattgagcctaggacccagcgagcccgtcgccgccgcggcggcgccgcccgggggtctgcgagcagaccgaaaaggtcacactctggggcgcgcgacccgcccgagtcagcggcccgccagttaccacccgccgaccaaacccccgcctccacggagggcgggggggtgcttaagaggatcgcggcgctcttctgcgtgcccgtggccaccaagaccaaaccccgagccgcctccgaatgagagtgtttcgttccttccccctccccccgcgtcagacaaaccctaaccaccgcttaagcggcccccgcgaggtccgaagactcatttggatccggcgggagccacccgacaacagcccccgggttttcccacgccagacgccggtccgctgtgccatcgcgccccctcatcccaccccccatcttgtccccaaataaaacaaggtctggtagttaggacaacgaccgcagttctcgtgtgttattttcgctctccgcctctcgcagatggacccgtactgcccatttgacgctctggacgtctgggaacacaggcgcttcatagtcgccgattcccgaaacttcatcacccccgagttcccccgggacttttggatgtcgcccgtctttaacctcccccgggagacggcggcggagcaggtggtcgtcctacaggcccagcgcacagcggctgccgctgccctggagaacgccgccatgcaggcggccgagctccccgtcgatatcgagcgccggttacgcccgatcgaacggaacgtgcacgagatcgcaggcgccctggaggcgctggagacggcggcggccgccgccgaagaggcggatgccgcgcgcggggatgagccggcgggtgggggcgacgggggggcgcccccgggtctggccgtcgcggagatggaggtccagatcgtgcgcaacgacccgccgctacgatacgacaccaacctccccgtggatctgctacacatggtgtacgcgggccgcggggcgaccggctcgtcgggggtggtgttcgggacctggtaccgcactatccaggaccgcaccatcacggactttcccctgaccacccgcagtgccgactttcgggacggccgtatgtccaagaccttcatgacggcgctggtactgtccctgcaggcgtgcggccggctgtatgtgggccagcgccactattccgccttcgagtgcgccgtgttgtgtctctacctgctgtaccgaaacacgcacggggccgccgacgatagcgaccgcgctccggtcacgttcggggatctgctgggccggctgccccgctacctggcgtgcctggccgcggtgatcgggaccgagggcggccggccacagtaccgctaccgcgacgacaagctccccaagacgcagttcgcggccggcgggggccgctacgaacacggagcgctggcgtcgcacatcgtgatcgccacgctgatgcaccacggggtgctcccggcggccccgggggacgtcccccgggacgcgagtacccacgttaaccccgacggcgtggcgcaccacgacgacataaaccgcgccgccgccgcgttcctcagccggggccacaacctattcctgtgggaggaccagactctgctgcgggcaaccgcgaacaccataacggccctgggcgttatccagcggctcctcgcgaacggcaacgtgtacgcggaccgcctcaacaaccgcctgcagctgggcatgctgatccccggagccgtcccttcggaggccatcgcccgtggggcctccgggtccgactcgggggccatcaagagcggagacaacaatctggaggcgctatgtgccaattacgtgcttccgctgtaccgggccgacccggcggtcgagctgacccagctgtttcccggcctggccgccctgtgtcttgacgcccaggcggggcggccggtcgggtcgacgcggcgggtggtggatatgtcatcgggggcccgccaggcggcgctggtgcgcctcaccgccctggaactcatcaaccgcacccgcacaaaccccacccctgtgggggaggttatccacgcccacgacgccctggcgatccaatacgaacaggggcttggcctgctggcgcagcaggcacgcattggcttgggctccaacaccaagcgtttctccgcgttcaacgttagcagcgactacgacatgttgtactttttatgtctggggttcattccacagtacctgtcggcggtttagtgggtggtgggcgaggggggagggggcattagggagaaagaacaagagcctccgttgggttttctttgtgcctgtactcaaaaggtcataccccgtaaacggcgggctccagtcccggcccggcggttggcgtgaacgcaacggcgggagctgggttagcgtttagtttagcattcgctctcgcctttccgcccgccccccgaccgttgcgcctttttttttttcgtccaccaaagtctctgtgggtgcgcgcatggcagccgatgccccgggagaccggatggaggagcccctgcccgacagggccgtgcccatttacgtggctgggtttttggccctgtatgacagcggggactcgggcgagttggcattggatccggatacggtgcgggcggccctgcctccggataacccactcccgattaacgtggaccaccgcgctggctgcgaggtggggcgggtgctggccgtggtcgacgacccccgcgggccgttttttgtggggctgatcgcctgcgtgcagctggagcgcgtcctcgagacggccgccagcgctgcgattttcgagcgccgcgggccgccgctctcccgggaggagcgcctgttgtacctgatcaccaactacctgccctcggtctccctggccacaaaacgcctggggggcgaggcgcaccccgatcgcacgctgttcgcgcacgtcgcgctgtgcgcgatcgggcggcgcctcggcactatcgtcacctacgacaccggtctcgacgccgccatcgcgccctttcgccacctgtcgccggcgtctcgcgagggggcgcggcgactggccgccgaggccgagctcgcgctgtccgggcgcacctgggcgcccggcgtggaggcgctgacccacacgctgctttccaccgccgttaacaacatgatgctgcgggaccgctggagcctggtggccgagcggcggcggcaggccgggatcgccggacacacctacctccaggcgagcgaaaaattcaaaatgtggggggcggagcctgtttccgcgccggcgcgcgggtataagaacggggccccggagtccacggacataccgcccggctcgatcgctgccgcgccgcagggtgaccggtgcccaatcgtccgtcagcgcggggtcgccttgtccccggtactgccccccatgaaccccgttccgacatcgggcaccccggcccccgcgccgcccggcgacgggagctacctgtggatcccggcctcccattacaaccagctcgtcgccggccatgccgcgccccaaccccagccgcattccgcgtttggtttcccggctgcggcggggtccgtggcctatgggcctcacggtgcgggtctttcccagcattaccctccccacgtcgcccatcagtatcccggggtgctgttctcgggacccagcccactcgaggcgcagatagccgcgttggtgggggccatagccgcggaccgccaggcgggcggtcagccggccgcgggagaccctggggtccgggggtcgggaaagcgtcgccggtacgaggcggggccgtcggagtcctactgcgaccaggacgaaccggacgcggactacccgtactaccccggggaggctcgaggcgggccgcgcggggtcgactcccggcgcgcggcccgccattctcccgggaccaacgagaccatcacggcgctgatgggggcggtgacgtctctgcagcaggaactggcgcacatgcgggctcggaccagcgccccctatggaatgtacacgccggtggcgcactatcgccctcaggtgggggagccggaaccaacaacgacccacccggccctttgtcccccggaggccgtgtatcgccccccaccacacagcgccccctacggtcctccccagggtccggcgtcccatgcccccactcccccgtatgccccagctgcctgcccgccaggcccgccaccgcccccatgtccttccacccagacgcgcgcccctctaccgacggagcccgcgttcccccccgccgccaccggatcccaaccggaggcatccaacgcggaggccggggcccttgtcaacgccagcagcgcagcacacgtggacgttgacacggcccgcgccgccgatttgttcgtctctcagatgatgggggcccgctgattcgccccggtctttggtaccatgggatgtcttactgtatatctttttaaataaaccaggtaataccaaataagacccattggtgtatgttctttttttattgggaggcgcgggtaggcgggtagctttacaatgcaaaagccttcgacgtggaggaaggcgtggggggggggggaatcggcactgaccaagggggtccgttttgtcacgggaaaggaaagaggaaacaggccgcggacacccgggggagtttgtgttcccttttctttcttcccacacacacaaaaggcgtaccaaacaaacaaaccaaaagatgcacatgcggtttaacacccgtggtttttatttacaacaaaccccccatcacaggtcgtcctcgtcggcgtcaccgtctttgttgggaacttgggtgtagttggtgttgcggcgcttgcgcatgaccatgtcggtgaccttggcgctgagcagcgcgctcgtgcccttcttcttggccttgtgttccgtgcgctccatggcagacaccagggccatgtaccgtatcatctcccgggcctcggctagcttggcctcgtcaaagtcgccgccctcctcgccctccccggacgcgtccgggttggtggggttcttgagctccttggtggttagcgggtacagggccttcatggggttgctctgcagccgcatgacgtagcgaaaggcgaagaaggccgccgccaggccggccaggaccaacagacccacggccagcgccccaaaggggttggacatgaaggaggacacgcccgacacggccgataccacgccgcccacgatgcccatcaccaccttgccgaccgcgcgccccaggtcgcccatcccctcgaagaacgcgcccaggcccgcaaacatggcggcgttggcgtcggcgtggatgaccgtgtcgatgtcggcgaagcgcaggtcgtgcagctggttgcggcgctggacctccgtgtagtccagcaggccgctgtccttgatctcgtggcgggtgtacacctccagggggacaaactcgtgatcctccagcatggtgatgttgaggtcgatgaaggtgctgacggtggtgatgtcggcgcggctcagctggtgggagtacgcgtactcctcgaagtacacgtagcccccaccgaaggtgaagtagcgccggtgtcccacggtgcacggctcgatcgcatcgcgcgtcagccgcagctcgttgttctcccccagctgcccctcgaccaacgggccctggtcttcgtaccgaaagctgaccagggggcggctgtagcaggccccgggccgcgagctgatgcgcatcgagttttggacgatcacgttgtccgcggcgaccggcacgcacgtggagacggccatcacgtcgccgagcatccgcgcgctcacccgccggcccacggtggccgaggcgatggcgttggggttcagcttgcgggcctcgttccacagggtcagctcgtgattctgcagctcgcaccacgcgatggcaacgcggcccaacatatcgttgacatggcgctgtatgtggttgtacgtaaactgcagcctggcgaactcgatggaggaggtggtcttgatgcgctccacggacgcgttggcgctggccccgggcggcgggggcgtggggtttgggggcttgcggctctgctcgcggaggtgttcccgcacgtacagctccgcgagcgtgttgctgagaaggggctggtacgcgatcagaaagcccccattggccaggtagtactgcggctggcccaccttgatgtgcgtcgcgttgtacctgcgggcgaagatgcggtccatggcgtcgcgggcgtccttgccgatgcagtcccccaggtccacgcgcgagagcgggtactcggtcaggttggtggtgaaggtggtggatatggcgtcggaagagaatcggaaggagccgccgtactcggagcgcagcatctcgtccacctcctgccacttggtcatggtgcagaccgacgggcgctttggcacccagtcccaggccacggtgaacttgggggtcgtgagcaggttccgggtggtcggcgccgtggcccgggccttggtggtgaggtcgcgcgcgtagaagccgtcgacctgcttgaagcggtcggcggcgtagctggtgtgttcggtgtgcgacccctcccggtagccgtaaaacggggacatgtacacaaagtcgccagtcgccaacacaaactcgtcgtacgggtacaccgagcgcgcgtccacctcctcgacgatgcagtttaccgtcgtcccgtaccggtggaacgcctccacccgcgaggggttgtacttgaggtcggtggtgtgccagccccggctcgtgcgggtcgcggcgttggccggtttcagctccatgtcggtctcgtggtcgtcccggtgaaacgcggtggtctccaggttgttgcgcacgtacttggccgtggaccgacagacccccttggcgttgatcttgtcgatcacctcctcgaaggggacgggggcgcggtcctcaaagatccccataaactgggagtagcggtggccgaaccacacctgcgaaacggtgacgtctttgtagtacatggtggccttgaacttgtacggggcgatgttctccttgaagaccaccgcgatgccctccgtgtagttctgaccctcgggccgggtcgggcagcggcgcggctgctcgaactgcaccaccgtggcgcccgtggggggtgggcacacgtaaaagtttgcatcggtgttctccgccttgatgtcccgcaggtgctcgcgcagggtggcgtggcccgcggcgacggtcgcgttgtcgccggcggggcgcggcggctttgggggtttcggttttttgttcttcttcggtttcgggtcccccgttgggggggcgccaggggcgggcggcgccggagtggcagggcccccgttcgccgcctgggtcgcggccgcgaccccaggcgtgccgggggaactcggagccgccgacgccaccaggacccccagcgtcaaccccaagagcgcccatacgacgaaccaccggcgcccccgcgcgggggcgccctggcgcatggcgggactacgggggcccgtcgtgccccccgtcaggtagcctgggggcgaggtgctggaggaccgagtagaggatcgagaaaacgtctcggtcgtagaccacgaccgaccgggggccgatacagccgtcgggggcgctctcgacgatggccaccagcggacagtcggagtcgtacgtgagatatacgccgggcgggtaacggtaacgaccttcggaggtcgggcggctgcagtccgggcggcgcaactcgagctccccgcaccggtagaccgaggcaaagagtgtggtggcgataatcagctcgcgaatatatcgccaggcggcgcgctgagtgggcgttattccggaaatgccgtcaaaacagtaaaacctctgaaattcgctgacggcccaatcagcacccgagccccccgcccccatgatgaaccgggcgagctcctccttcaggtgcggcaggagccccacgttctcgacgctgtaatacagcgcggtgttggggggctgggcgaagctgtgggtggagtgatcaaagaggggcccgttgacgagctcgaagaagcgatgggtgatgctggggagcagggccgggtccacctggtgtcgcaggagagacgctcgcatgaaccggtgcgcgtcgaacacgcccggcgccgagcggttgtcgatgaccgtgcccgcgcccgccgtcagggcgcagaagcgcgcgcgcgccgcaaagccgttggcgaccgcggcgaacgtcgcgggcagcacctcgccgtggacgctgacccgcagcatcttctcgagctccccgcgctgctcgcggacgcagcgccccaggctggccaacgaccgcttcgtcaggcggtccgcgtacagccgccgtcgctcccgcacgtccgcggccgcttgcgtggcgatgtccccccacgtctcgggcccctgccccccgggcccgcggcgacggtcttcgtcctcgcccccgcccccgggagctcccaacccccgtgccccttcctctacggcgacacggtccccgtcgtcgtcggggcccgcgccgcccttgggcgcgtccgccgcgccccccgcccccatgcgcgccagcacgcgacgcagcgcctcctcgtcgcactgttcggggctgacgaggcgccgcaagagcggcgtcgtcaggtggtggtcgtagcacgcgcggatgagcgcctcgatctgatcgtcgggtgacgtggcctgaccgccgattattagggcgtccaccatatccagcgccgccaggtggctcccgaacgcgcgatcgaaatgctccgcccgccgcccgaacagcgccagttccacggccaccgcggcggtctcctgctgcaactcgcgccgcgccagcgcggtcaggttgctggcaaacgcgtccatggtggtctggccggcgcggtcgccggacgcgagccagaatcgcaattcgctgatggcgtacaggccgggcgtggtggcctgaaacacgtcgtgcgcctccagcagggcgtcggcctccttgcggaccgagtcgttctcgggcgacgggtggggctgcccgtcgccccccgcggtccgggccagcgcatggtccaacacggagagcgcccgcgcgcggtcggcgtccgacagcccggcggcgtggggcaggtaccgccgcagctcgttggcgtccagccgcacctgcgcctgctgggtgacgtggttacagatacggtccgccaggcggcgggcgatcgtcgccccctggttcgccgtcacacacagttcctcgaaacagaccgcgcaggggtgggacgggtcgctaagctccggggggacgataaggcccgaccccaccgcccccaccataaactcccgaacgcgctccagcgcggcggtggcgccgcgcgagggggtgatgaggtggcagtagtttagctgctttagaaagttctcgacgtcgtgcaggaaacacagctccatatggacggtcccgccatacgtatccagcctgacccgttggtgatacggacagggtcgggccaggcccatggtctccgtgaaaaacgccgcgacgtctcccgcggtcgcgaacgtctccaggctgcccaggagccgctcgccctcgcgccacgcgtactctagcagcaactccagggtgaccgacagcggggtgagaaaggccccggcctgggcctccaggcccggcctcagacgacgccgcagcgcccgcacctgaagcgcgttcagcttcagttgggggagcttcccccgtccgatgtgggggtcgcaccgccggagcagctctatctgaaacacataggtctgcacctgcccgagcagggctaacaacttttgacgggccacggtgggctcggacaccggggcggccatctcgcggcgccgatctgtaccgcggccggagtatgcggtggaccgaggcggtccgtacgctacccggcgtctggctgagccccggggtccccctcttcggggcggcctcccgcgggcccgccgaccggcaagccgggagtcggcggcgcgtgcgtttctgctctattcccagacaccgcggagaggaatcacggcccgcccagagatatagacacggaacacaaacaagcacggatgtcgtagcaataatttattttacacacattccccgccccgccctaggttcccccaccccccaacccctcacagcatatccaacgtcaggtctccctttttgtcggggggcccctccccaaacgggtcatccccgtggaacgcccgtttgcggccggcaaatgccggtcccggggcccccgggccgccgaacggcgtcgcgttgtcgtcctcgcagccaaaatccccaaagttaaacacctccccggcgttgccgagttggctgactagggcctcggcctcgtgcgccacctccagggccgcgtccgtcgaccactcgccgttgccgcgctccagggcacgcgcggtcagctccatcatctcctcgcttaggtactcgtcctccaggagcgccagccagtcctcgatctgcagctgctgggtgcggggccccaggcttttcacggtcgccacgaacacgctactggcgacggccgccccgccctcggagataatgccccggagctgctcgcacagcgagctttcgtgcgctccgccgccgaggcttgaggccgcgcacacaaacccggcccggggacaggccaggacgaacttgcgggtgcggtcaaaaataaggagcgggcacgcgtttttgccgcccatcaggctggcccagttcccggcctgaaacacacggtcgttgccggccatgccgtagtacttgctgatgctcaaccccaacacgaccatggggcgcgccgccatgacgggccgcagcaggttgcagctggcgaacatggacgtccacgcgcccggatgcgcgtccacggcgtccatcagcgcgcgggccccggcctccaggcccgccccgccctgcgcggaccacgcggccgcagcctgcacgctggggggacggcgggaccccgcgatgatggccgtaagggtgttgatgaagtatgtcgagtgatcgcagtaccgcagaatctggtttgccatgtagtacatcgccagctcgctcacgttgttgggggccaggttaataaagtttatcgcgccgtagtccagggaaaactttttaatgaacgcgatggtctcgatgtcctcgcgcgacaggagccgggcgggaagctggttgcgttggagggccgtccagaaccactgcgggttcggctggttggaccccgggggcttgccgttggggaagatggccgcgtggaactgcttcagcagaaagcccagcggtccgaggaggatgtccacgcgcttgtcgggcttctggtaggcgctctggaggctggcgacccgcgccttggcggcctcggacgcgttggcgctcgcgcccgcgaacaacacgcggctcttgacgcgcagctccttgggaaaccccagggtcacgcgggcaacgtcgccctcgaagctgctctcggcgggggccgtctggccggccgttaggctgggggcgcagatagccgccccctccgagagcgcgaccgtcagcgttttggccgacagaaacccgttgttaaacatgtccatcacgcgccgccgcagcaccggttggaattgattgcgaaagttgcgcccctcgaccgactgcccggcgaacaccccgtggcactgactcagggccaggtcctggtacacggcgaggttggatcgccgcccgagaagctgaagcagggggcacggcccgcacgcgtacgggtccagcgtcagggacatggcgtggttggcctcgcccagaccgtcgcgaaacttgaagttcctcccctccaccaggttgcgcatcagctgctccacctcgcggtccacgacctgcctgacgttgttcaccaccgtatgcagggcctcgcggttggtgatgatggtctccagccgccccatggccgtggggaccgcctggtccacgtactgcagggtctcgagttcggccatgacgcgctcggtcgccgcgcggtacgtctcctgcatgatggtccgggcggtctcggatccgtccgcgcgcttcagggccgagaaggcggcgtagtttcccagcacgtcgcagtcgctgtacatgctgttcatggtcccgaagacgccgatggctccgcgggcggcgctggcgaactttggatggcgcgcccggaggcgcatgagcgtcgtgtgtacgcaggcgtggcgcgtgtcgaaggtgcataggttacagggcacgtcggtctggttggagtccgcgacgtatcgaaacacgtccatctcctggcgcccgacgatcacgccgccgtcgcagcgctccaggtaaaacagcatcttggccagcagcgccggggaaaacccacacagcatggccaggtgctcgccggcaaattcctgggttccgccgacgaggggcgcggtgggccgaccctcgaacccgggcaccacgtgtccctcgcggtccacctgtgggttggccgccacgtgggtcccgggcacgaggaagaagcggtaaaaggagggtttgctgtggtcctttgggtccgccgggccggcgtcgtccacctcggtgagatggagggccgagttggtgctaaataccatggcccccacgagtcccgcggcgcgcgccaggtacgccccgacggcgttggcgcgggccgcggccgtgtcctggccctcgaacagcggccacgcggagatgtcggtgggcggctcgtcaaagacggccatcgacacgatagactcgagggccagggcggcgtctccggccatgacggaggccaggcgctgttcgaacccgcccgccgggcccttgccgccgccgtcgcgcccgccccgcggggtcttaccctggctggcttcgaaggccgtgaacgtaatgtcggcggggagggcggcgccctcgtggttttcgtcaaacgccaggtgggcggccgcgcgggccacggcgtccacgtttcggcatcgcagtgccacggcggcgggtcccacgaccgcctcgaacaggaggcggttgagggggcggttaaaaaacggaagcgggtaggtaaaattctccccgatcgatcggtggttggcgttgaacggctctgcgatgacacggctaaaatccggcatgaacagctgcaacgggtacacgggtatgcggtgcacctccgccccgcctatggttaccttgtccgagcctcccaggtgcagaaaggtgttgttgatgcacacggcctccttgaagccctcggtaacgaccagatacaggagggcgcggtccgggtccaggccgaggcgctcacacagcgcctcccccgtcgtctcgtgtttgaggtcgccgggccggggggtgtagtccgaaaagccaaaatggcggcgtgcccgctcgcaaagtcgcgtcaggttcggggcctgggtgctggggtccaggtgccggccgccgtgaaagacgtacacggacgagctgtagtgcgagggcgtcagtttcagggacaccgcggtacccccgagccccgtcgtgcgagaacccacgaccacggccacgttggcctcaaagccgctctccacggtcaggcccacgaccaggggcgccacggcgacgtcggaatcgccgctgcgtgccgacagtaacgccagaagctcgatgccttcggacggacacgcgcgagcgtacacgtatcccaggggcccgggggggaccttgatggtggttgccgtcttgggctttgtctccatgtccttttgtcaatcggtccgcgaacggaggtaatcccggcacgacgacggacgcccgacaaggtatgtctcccgagcgtcaaaatccgggggggggcggcgacggtcaaggggagggttggagaccggggttggggaatgaatccctccccttcaccgacaaccccccgggtaaccacggggtgccgatgaaccccggcggccggcaacgcggggtccctgcgagaggcacagatgcttacggtcaggtgctccgggtcgggtgcgtctggtatgcggttggtatatgtacactttacctgggggcgtgccggtccgccccagcccctcccacgccccgcgcgtcatcagccggtgggcgtggccgctattataaaaaaagtgagaacgcgaagcgttcgcactttgtcctaataatatatatattattaggacaaagtgcgaacgcttcgcgttctcactttttttataatagcggccacgcccaccggctacgtcactctcctgtcggccgccggcggtccataagcccggccggccgggccgacgcgaataaaccgggccgccggccggggcgccgcgcagcagctcgccgcccggatccgccagacaaacaaggcccttgcacatgccggcccgggcgagcctgggggtccggtaattttgccatcccacccaagcggctttttgggtttttctcttcccccctccccacattcccctctttaggggttcgggtgggaacaaccgcgatgttttccggtggcggcggcccgctgtcccccggaggaaagtcggcggccagggcggcgtccgggttttttgcgcccgccggccctcgcggagccagccggggacccccgccttgtttgaggcaaaacttttacaacccctacctcgccccagtcgggacgcaacagaagccgaccgggccaacccagcgccatacgtactatagcgaatgcgatgaatttcgattcatcgccccgcgggtgctggacgaggatgcccccccggagaagcgcgccggggtgcacgacggtcacctcaagcgcgcccccaaggtgtactgcgggggggacgagcgcgacgtcctccgcgtcgggtcgggcggcttctggccgcggcgctcgcgcctgtggggcggcgtggaccacgccccggcggggttcaaccccaccgtcaccgtctttcacgtgtacgacatcctggagaacgtggagcacgcgtacggcatgcgcgcggcccagttccacgcgcggtttatggacgccatcacaccgacggggaccgtcatcacgctcctgggcctgactccggaaggccaccgggtggccgttcacgtttacggcacgcggcagtacttttacatgaacaaggaggaggtcgacaggcacctacaatgccgcgccccacgagatctctgcgagcgcatggccgcggccctgcgcgagtccccgggcgcgtcgttccgcggcatctccgcggaccacttcgaggcggaggtggtggagcgcaccgacgtgtactactacgagacgcgccccgctctgttttaccgcgtctacgtccgaagcgggcgcgtgctgtcgtacctgtgcgacaacttctgcccggccatcaagaagtacgagggtggggtcgacgccaccacccggttcatcctggacaaccccgggttcgtcaccttcggctggtaccgtctcaaaccgggccggaacaacacgctagcccagccgcgggccccgatggccttcgggacatccagcgacgtcgagtttaactgtacggcggacaacctggccatcgaggggggcatgagcgacctaccggcatacaagctcatgtgcttcgatatcgaatgcaaggcggggggggaggacgagctggcctttccggtggccgggcacccggaggacctggtcatccagatatcctgtctgctctacgacctgtccaccaccgccctggagcacgtcctcctgttttcgctcggttcctgcgacctccccgaatcccacctgaacgagctggcggccaggggcctgcccacgcccgtggttctggaattcgacagcgaattcgagatgctgttggccttcatgacccttgtgaaacagtacggccccgagttcgtgaccgggtacaacatcatcaacttcgactggcccttcttgctggccaagctgacggacatttacaaggtccccctggacgggtacggccgcatgaacggccggggcgtgtttcgcgtgtgggacataggccagagccacttccagaagcgcagcaagataaaggtgaacggcatggtgaacatcgacatgtacgggattataaccgacaagatcaagctctcgagctacaagctcaacgccgtggccgaagccgtcctgaaggacaagaagaaggacctgagctatcgcgacatccccgcctactacgccgccgggcccgcgcaacgcggggtgatcggcgagtactgcatacaggattccctgctggtgggccagctgttttttaagtttttgccccatctggagctctcggccgtcgcgcgcttggcgggtattaacatcacccgcaccatctacgacggccagcagatccgcgtctttacgtgcctgctgcgcctggccgaccagaagggctttattctgccggacacccaggggcgatttaggggcgccgggggggaggcgcccaagcgtccggccgcagcccgggaggacgaggagcggccagaggaggagggggaggacgaggacgaacgcgaggagggcgggggcgagcgggagccggagggcgcgcgggagaccgccggcaggcacgtggggtaccagggggccagggtccttgaccccacttccgggtttcacgtgaaccccgtggtggtgttcgactttgccagcctgtaccccagcatcatccaggcccacaacctgtgcttcagcacgctctccctgagggccgacgcagtggcgcacctggaggcgggcaaggactacctggagatcgaggtgggggggcgacggctgttcttcgtcaaggctcacgtgcgagagagcctcctcagcatcctcctgcgggactggctcgccatgcgaaagcagatccgctcgcggattccccagagcagccccgaggaggccgtgctcctggacaagcagcaggccgccatcaaggtcgtgtgtaactcggtgtacgggttcacgggagtgcagcacggactcctgccgtgcctgcacgttgccgcgacggtgacgaccatcggccgcgagatgctgctcgcgacccgcgagtacgtccacgcgcgctgggcggccttcgaacagctcctggccgatttcccggaggcggccgacatgcgcgcccccgggccctattccatgcgcatcatctacggggacacggactccatctttgtgctgtgccgcggcctcacggccgccgggctgacggccgtgggcgacaagatggcgagccacatctcgcgcgcgctgtttctgccccccatcaaactcgagtgcgaaaagacgttcaccaagctgctgctgatcgccaagaaaaagtacatcggcgtcatctacgggggtaagatgctcatcaagggcgtggatctggtgcgcaaaaacaactgcgcgtttatcaaccgcacctccagggccctggtcgacctgctgttttacgacgataccgtctccggagcggccgccgcgttagccgagcgccccgcggaggagtggctggcgcgacccctgcccgagggactgcaggcgttcggggccgtcctcgtagacgcccatcggcgcatcaccgacccggagagggacatccaggactttgtcctcaccgccgaactgagcagacacccgcgcgcgtacaccaacaagcgcctggcccacctgacggtgtattacaagctcatggcccgccgcgcgcaggtcccgtccatcaaggaccggatcccgtacgtgatcgtggcccagacccgcgaggtagaggagacggtcgcgcggctggccgccctccgcgagctagacgccgccgccccaggggacgagcccgccccccccgcggccctgccctccccggccaagcgcccccgggagacgccgtcgcctgccgaccccccgggaggcgcgtccaagccccgcaagctgctggtgtccgagctggccgaggatcccgcatacgccattgcccacggcgtcgccctgaacacggactattacttctcccacctgttgggggcggcgtgcgtgacattcaaggccctgtttgggaataacgccaagatcaccgagagtctgttaaaaaggtttattcccgaagtgtggcaccccccggacgacgtggccgcgcggctccggaccgcagggttcggggcggtgggtgccggcgctacggcggaggaaactcgtcgaatgttgcatagagcctttgatactctagcatgagccccccgtcgaagctgatgtccctcattttacaataaatgtctgcggccgacacggtcggaatctccgcgtccgtgggtttctctgcgttgcgccggaccacgagcacaaacgtgctctgccacacgtgggcgacgaaccggtaccccgggcacgcggtgagcatccggtctatgagccggtagtgcaggtgggcggacgtgccgggaaagatgacgtacagcatgtggcccccgtaagtggggtccgggtaaaacaacagccgcgggtcgcacgccccgcctccgcgcaggatcgtgtggacgaaaaaaagctcgggttggccaagaatcccggccaagaggtcctggaggggggcgttgtggcggtcggccaacacgaccaaggaggccaggaaggcgcgatgctcgaatatcgtgttgatctgctgcacgaaggccaggattagggcctcgcggctggtggcggcgaaccgcccgtctcccgcgttgcacgcgggacagcaacccccgatgcctaggtagtagcccatcccggagagggtcaggcagttgtcggccacggtctggtccagacagaagggcagcgagacgggagtggtcttcaccaggggcaccgagagcgagcgcacgatggcgatctcctcggagggcgtctgggcgagggcggcgaaaaggccccgatagcgctggcgctcgtgtaaacacagctcctgtttgcgggcgtgaggcggcaggctcttccgggaggcccgacgcaccacgcccagagtcccgccggccgcagaggagcgcgaccgccggcgctccttgccgtgatagggcccgggccgggagccgcggcgatgggggtcggtgtcatacataggtacacagggtgtgctccagggacaggagcgagatcgagtggcgtctaagcagcgcgcccgcctcacggacaaatgtggcgagcgcggtgggctttggtacaaatacctgatacgtcttgaaggtgtagatgagggcacgcaacgctatgcagacacgcccctcgaactcgttcccgcaggccagcttggccttgtggagcagcagctcgtcgggatgggtggcggggggatggccgaacagaacccaggggtcaacctccatctccgtaatggcgcacatggggtcacagaacatgtgcttaaagatggcctcgggccccgcggcccgaagcaggctcacaaaccggcccccgtccccgggctgcgtctcggggtcagcctcgagctggtcgacgacgggtacgatacagtcgaagaggctcgtgttgttttccgagtagcggaccacggaggcccggagtctgcgcagggccagccagtaagcacgcaccagtaacaggttacacagcaggcattctccgccggtgcgcccgcgcccccggccgtgtttcagcacggtggccatcagagggcccaggtcgaggtcgggctgggcatcgggttcggtaaactgcgcaaagcgcggagccacgtcgcgcgtgcgtgccccgcgatgcgcttcccaggactggcggaccgtggcgcgacgggcctccgcggcagcgcgcagctggggccccgactcccagacggcgggggtgccggcgaggagcaacaggaccagatccgcgtacgcccacgtatccggcgactcctccggctcgcggtccccggcgaccgtctcgaattccccgttgcgagcggcggcgcgagtacagcagctgtccccgcccccgcgccgaccctccgtgcagtccaggagacgggcgcaatccttccagttcatcagcgcggtggtgagcgacggctgcgtgccggatcccgccgccgaccccgccccctcctcgcccccggaggccaaggttccgatgagggcccgggtggcagactgcgccaggaacgagtagttggagtactgcaccttggcggctcccggggagggcgagggcttgggttgcttctgggcatgccgcccgggcaccccgccgtcggtacggaagcagcagtggagaaaaaagtgccggtggatgtcgtttatggtgagggcaaagcgtgcgaaggagccgaccagggtcgccttcttggtgcgcagaaagtggcggtccatgacgtacacaaactcgaacgcggccacgaagatgctagcggcgcagtggggcgcccccaggcatttggcacagagaaacgcgtaatcggccacccactgaggcgagaggcggtaggtttgcttgtacagctcgatggtgcggcagaccagacagggccggtccagcgcgaaggtgtcgatggccgccgcggaaaagggcccggtgtccaaaagcccctccccacagggatccgggggcgggttgcggggtcctccgcgcccgcccgaaccccctccgtcgcccgcccccccgcgggcccttgagggggcggtgaccacgtcggcggcgacgtcctcgtcgagcgtaccgacgggcggcacacctatcacgtgactggccgtcaggagctcggcgcagagagcctcgttaagagccaggaggctgggatcgaaggccacatacgcgcgctcgaacgcccccgccttccagctgctgccgggggactcttcgcacaccgcgacgctcgccaggaccccggggggcgaagttgccatggctgggcgggaggggcgcacgcgccagcgaactttacgggacacaatccccgactgcgcgctgcggtcccagaccctggagagtctagacgcgcgctacgtctcgcgagacggcgcgcatgacgcggccgtctggttcgaggatatgacccccgccgagctggaggttgtcttcccgactacggacgccaagctgaactacctgtcgcggacgcagcggctggcctccctcctgacgtacgccgggcctataaaagcgcccgacgacgccgccgccccgcagaccccggacaccgcgtgtgtgcacggcgagctgctcgcccgcaagcgggaaagattcgcggcggtcattaaccggttcctggacctgcaccagattctgcggggctgacgcgcgtgctgttgggcgggacggttcgcgaaccctttggtgggtttacgcgggcacgcacgctcccatcgcgggcgccatggcgggactgggcaagccctacaccggccacccaggtgacgccttcgagggtctcgttcagcgaattcggcttatcgtcccatctacgttgcggggcggggacggggaggcgggcccctactctccctccagcctcccctccaggtgcgcctttcagtttcatggccatgacgggtccgacgagtcgtttcccatcgagtatgtactgcggcttatgaacgactgggccgaggtcccgtgcaacccttacctgcgcatacagaacaccggcgtgtcggtgctgtttcaggggttttttcatcgcccacacaacgcccccgggggcgcgattacgccagagcggaccaatgtgatcctgggctccaccgagacgacggggctgtccctcggcgacctggacaccatcaaggggcggctcggcctggatgcccggccgatgatggccagcatgtggatcagctgctttgtgcgcatgccccgcgtgcagctcgcgtttcggttcatgggccccgaagatgccggacggacgagacggatcctgtgccgcgccgccgagcaggctattacccgtcgccgccgaacccggcggtcccgggaggcgtacggggccgaggccgggctgggggtggccggaacgggtttccgggccaggggggacggttttggcccgctccccttgttaacccaagggccctcccgcccgtggcaccaggccctgcggggtcttaagcacctacggattggcccccccgcgctcgttttggcggcgggactcgtcctgggggccgctatttggtgggtggttggtgctggcgcgcgcctataaaaaaggacgcaccgccgccctaatcgccagtgcgttccggacgccttcgccccacacagccctcccgaccgacacccccatatcgcttcccgacctccggtcccgatggccgtcccgcaatttcaccgccccagcaccgttaccaccgatagcgtccgggcgcttggcatgcgcgggctcgtcttggccaccaataactctcagtttatcatggataacaaccacccgcacccccagggcacccaaggggccgtgcgggagtttctccgcggtcaggcggcggcgctgacggaccttggtctggcccacgcaaacaacacgtttaccccgcagcctatgttcgcgggcgacgccccggccgcctggttgcggcccgcgtttggcctgcggcgcacctattcaccgtttgtcgttcgagaaccttcgacgcccgggaccccgtgaggcccggggagttccttctggggtgttttaatcaataaaagaccacaccaacgcacgagccttgcgtttaatgtcgtgtttattcaagggagtgggatagggttcgacggttcgaaacttaacacaccaaataatcgagcgcgtctagcccagtaacatgcgcacgtgatgtaggctggtcagcacggcgtcgctgtgatgaagcagcgcccggcgggtccgctgtaactgctgttgtaggcggtaacaggcgcggatcagtaccgccagggcgctacgaccggtgcgttgcacgtagcgtcgcgacagaactgcgtttgccgatacgggcggggggccgaattgtaagcgcgtcacctcttgggagtcatcggcggataacgcactgaatggttcgttggttatgggggagtgtggttccccagggagtgggtcgagcgcctcggcctcggaatccgagaggaacaacgaggtggcgtcggagtcttcgtcgtcagagacatacagggtctgaagcagcgacacgggcgggggggtagcgtcgatgtgtagcgcgagggaggatgcccacgaagacaccccagacaaggagctgcccgtgcgtggatttgtggaagacgcggaagccgggacggatgggcggttttgcggtgcccggaaccgaaccgccggatactccccgggtgctacatgcccgttttggggctggggttggggctggggttggggctggggttggggctggggttggggctggggttggggctggggttggggttggggttggggctggggttggggttggggctggggctggggctggggctggggctggggctggggctggggctggggctggggctggggctggggctggggctggggctggggctggggctggggttggggcgcggacaggcggctgacggtcaaatgcccccgggggcgcgcagatgtggtgggcgtggccaccggctgccgtgtagtggggcggcgggaaaccgggcctccgggcgcaacaccgccctccagcgtcaagtatgtggggggcgggcctgacgtcgggggcggggcgacgggttggaccgcgggaggcgggggagagggacctgcgggagaggatgaggtcggctcggccgggttgcggcctaaaacaggggccgtggggtcggcggggtcccagggtgaagggagggattcccgcgattcggacagcgacgcgacagcggggcgcgtaaggcgccgctgcggcccgcctacgggaaccctggggggggttggcgcgggacccgaggttagcggggggcggcggttttcgcccccgggcaaaaccgtgccggttgcgaccgggggcggaacgggatcgatagggagagcgggagaagcctggccggcggcctggggcccgagcgggaggggcacaccagacaccaaagcgtggggcgctggctctgggggtttgggaggggccggggggcgcgcgaaatcggtaaccggggcgaccgtgtcggggagggcaggcggccgccaaccctgggtggtcgcggaagcctgggtggcgcgcgccagggagcgtgcccggcggtgtcggcgcgcgcgcgacccggacgaagaagcggcagaagcgcgggaggaggcgggggggcggggggcggtggcatcggggggcgccggggaactttggggggacggcaagcgccggaagtcgtcgcgggggcccacgggcgccggccgcgtgctttcggccgggacgcccggtcgtgcttcgcgagccgtgactgccggcccagggggccgcggtgcacactgggacgtggggacggactgatcggcggtgggcgaaagggggtccggggcaaggaggggcgcggggccgccggagtcgtcagacgcgagctcctccaggccgtgaatccatgcccacatgcgaggggggacgggctcgccgggggtggcgtcggtgaatagcgtgggggccaggcttccgggccccaacgagccctccgccccaacaaggtccacagggccgggggtcgggttcgggaccgaggggctctggtcgtcgggggcgcgctggtacaccggatgccccgggaatagctcccccgacaggagggaggcgtcgaacggccgcccgaggatagctcgcgcgaggaaggggtcctcgtcggtggcgctggcggcgaggacgtcctcgccgcccgccacaaacgggagctcctcggtggcctcgctgccaacaaaccgcacgtcgggggggccgggggggtccgggttttcccacaacaccgcgaccggggtcatggagatgtccacgagcaccagacacggcgggccccgggcgaggggccgctcggcgatgagcgcggacaggcgcgggagctgtgccgccagacacgcgttttcgatcgggttcaggtcggcgtgcaggaggcggacggcccacgtctcgatgtcggacgacacggcatcgcgcaaggcggcgtccggcccgcgagcgcgtgagtcaaacagcgtgagacacagctccagctccgactcgcgggaaaaggccgtggtgttgcggagcgccacgacgacgggcgcgcccaggagcactgccgccagcaccaggtccatggccgtaacgcgcgccgcgggggtgcggtgggtggcggcggccggcacggcgacgtgctggcccgtgggccggtagagggcgttggggggagcggggggtgacgcctcgcgcccccccgaggggctcagcgtctgcccagattccagacgcgcggtcagaagggcgtcgaaactgtcatactctgtgtagtcgtccggaaacatgcaggtccaaagagcgaccagagcggtgcttgggagacacatgcgcccgaggacgctcaccgccgccagcgcctgggcgggactcagctttcccagcgcggcgccgcgctcggttcccagctcggggaccgagcgccagggcgccagggggtcggtttcggacaacttgccgcggcgccagtctgccagccgcgtgccgaacatgaggccccgggtcggagggcctccggccgaaaacgctggcagcacgcggatgcgggcgtctggatgcggggtcaggcgctgcacgaatagcatggaatctgctgcgttctgaaacgcacgggggagggtgagatgcatgtactcgtgttggcgaaccagatccaggcgccaaaaggtgtaaatgtgttccggggagctggccaccagcgccaccagcacgtcgttctcgttaaaggaaacgcggtgcctagtggagctctggggtccgagcggcggccccggggccgccgcgtcacccccccattccagctgggcccagcgacacccaaactcgcgcgtgagagtggtcgcgacgagggcgacgtagagctcggccgccgcatccatcgaggccccccatctcgcctggcggtggcgcacaaagcgtccgaagagctgaaagttggcggcctgggcgtcgctgagggccagctgaagccggttgatgacggtgaggacgtacatggccgtgacggtcgaggccgactccagggtgtccgtcggaagcggggggcgaatgcatgccgcctcgggacacatcagcagcgcgccgagcttgtcggtcacggccgggaagcagagcgcgtactgcagtggcgttccatccgggaccaaaaagctgggggcgaacggccgatccagcgtactggtggcctcgcgcagcaccaggggccccgggcctccgctcactcgcaggtacgcctcgccccggcggcgcagcatctgcgggtcggcctcttggccgggtggggcggacgcccgggcgcgggcgtctagggcgcgaagatccacgagcaggggcgcgggcgcggccgccgcgcccgcgcccgtctggcctgtggccttggcgtacgcgctatataagcccatgcggcgttggatgagctcccgcgcgccccggaactcctccaccgcccatggggccaggtccccggccaccgcgtcgaattccgccaacaggccccccagggtgtcaaagttcatctcccaggccacccttggcaccacctcgtcccgcagccgggcgctcaggtcggcgtgttgggccacgcgccccccgagctcctccacggccccggcccgctcggcgctcttggcgcccaggacgccctggtacttggcgggaaggcgctcgtagtcccgctgggctcgcagccccgacacagtgttggtggtgtcctgcagggcgcgaagctgctcgcatgccgcgcgaaatccctcgggcgatttccaggcccccccgcgaacgcggccgaagcgaccccatacctcgtcccactccgcctcggcctcctcgagagacctccgcagggcctcgacgcggcgacgggtgtcgaagagcgcctgcaggcgcgcgccctgtcgcgtcaggaggcccgggccgtcgccgctggccgcgcttagcgggtgcgtctcaaaggtacgctgggcatgttccaaccaggcgaccgcctgcacgtcgagctcgcgcgccttctccgtctggtccaccagaatttcgacctgatccgcgatctcctccgccgagcgcgcctggtccagcgtcttggccacggtcgccgggacggcgaccaccttcagcagggtcttcagattggccagaccctcggcctcgagctgggcccggcgctcgcgcgcggccagcacctcccgcagccccgccgtgacccgctcggtggcttcggcgcgctgctgtttggcgcgcaccacggcgtccttggtatcggccaggtcctgtcgggtcacgaatgcgacgtagtcggcgtacgccgtgtccttcacggggctctggtccacgcgctccagcgccgccacgcacgccaccagcgcgtcctcgctcgggcagggcagggtgacccctgcccggacaagctcggcggccgccgccgggtcgttgcgcaccgcggatatctcctccgcggcggcggccaggtccagcgccacgcttccgatcgcgcgccgcgcgtcggcccggagggcgtccaggcgatcgcggatatccacgtactcggcgtagcccttttgaaaaaacggcacgtactggcgcagggccggcacgccccccaagtcttccgacaggtgtaggacggcctcgtggtagtcgataaacccgtcgttcgcctgggcccgctccagcagcccccccgccagccgcagaagccgcgccaggggctcggtgtccacccgaaacatgtcggcgtacgtgtcggccgcggccccgaaggccgcgctccagtcgatgcggtgaatggctgcgagcggggggagcatggggtggcgctggttctcgggggtgtatgggttaaacgcaagggccgtctccagggcaagggtcaccgccttggcgttggttcccagcgcctgttcggcccgctttcggaagtcccgggggttgtagccgtgcgtgcccgccagcgcctgcaggcgacggagctcgaccacgtcaaactcggcaccgctttccacgcggtccagcacggcctccacgtcggcggcccagcgctcgtggctactgcgggcgcgctgggccgccatcttctctctgaggtcggcggtggcggcctcaagttcgtcggcgcggcgtcgcgtggcgccgatgacctttcccagctcctgcagggcgcgcccgctgggggagtggtccccggccgtcccttcggcgtgcaacaggcccccgaacctgccctcgtggcccgcgaggctttcccgcgcgccggtggtcgcgcgcgtcgcggcctggatcagggaggcatgctctccctccggttggttggcggcccggcgcacctggacgacaaggtcggcggcagccgaccctaaggtcgtgagctgggcgatggccacccgcgcgtccagggccaaccgagtcgccttgacgtatcccgcggcgctgtcggccatggccgctaggaaggccaggggggaggccgggtcgctggcggccgcgcccagggccgtcaccgcgtcgaccaggacgcggtgcgcccgcacggccgcatccaccgtcgacgcagggtctgccgttgcgacggcggcgctgccggcgttgatggcgttcgagacggcgtgggctatgatcggggcgtgatcggcgaagaactgcaagagaaacggagtctctggggcgtcggcgaacaggttcttcagcaccaccacgaagctgggatgcaagccagacagagccgtcgccgtgtccggagtcgggtgctccagggcatctcggtactgccccagcagcccccacatgtccgcccgcagcgccgccgtaacctcagggggcgccccccgaacggcctcggggaggtccgaccagcccgccggcagggaggcccgcagggtcgccaggacggccggacaggcctttagccccacaaagtcagggagggggcgcaggaccccctggagtttgtgcaagaacttctcccgggcgtcgcgggccaccttcgcccgctcccgcgctccctcgagcattgcctccagggagcgcgcgcgctcccgcaaacgggcacgcgcatcgggggcgagctctgccgtcagcttggcggcatccatggcccgcgcctgccgcagcgcttcctcggccatgcgcgtggcctctggcgacagcccgccgtcgtcggggtagggcgacgcgccgggcgcaggaacaaaggccgcgtcgctgtccagctgctggcccagggccgcatctagggcgtcgaagcgccgcagctcggccagacccgagctgcggcgcgcctgttggtcgttaatgtcgcggatgctgcgcgccagctcgtccagtggcttgcgttctatcagcccttggttggcggcgtccgtcaggacggagagccaggccgccaggtcctcgggggcgtccagcgtctggccccgctggatcagatcccgcaacaggatggccgtggggctggtcgcgatcgggggcggggcgggaatggcggcgcgctgcgcgatgtcccgcgtgtgctggtcgaagacaggcagggactcgagcagctggaccacgggcacgacggcggccgaagccacgtgaaaccggcggtcgttgttgtcgctggcctgtagagccttggcgctgtatacggccccccggtaaaagtactccttaaccgcgccctcgatcgcccgacgggcctgggtccgcacctcctccagccgaacctgaacggcctcggggcccagggggggtgggcgcggagccccctgcggggccgccccggccggggcgggcattacgccgaggggcccggcgtgctgtgagaccgcgtcgaccccgcgagcgagggcgtcgagggcctcgcgcatctggcgatcctccgcctccaccctaatctcttcgccacgggcaaatttggccagagcctggactctatacagaagcggttctgggtgcgtcggggtggcgggggcaaaaagggtgtccgggtgggcctgcgagcgctccagaagccactcgccgaggcgtgtatacagattggccggcggggccgcgcgaagctgcagctccaggtccgcgagttccccgtaaaaggcgtccgtctcccgaatgacatccctagccacaaggatcagcttcgccagcgccaggcgaccgatcagagagttttcgtccagcacgtgctggacgaggggcagatgggcggccacgtcggccaggctcaggcgcgtggaggccagaaagtcccccacggccgttttccagggcagcatgttcagggtaaactccagcagggcggcggccgggccggccaccccggcctgggtgtgcgtccgggccccgttctcgatgagaaaggcgaggacgcgttcaaagaaaaaaataacacagagctccagcagccccggagaggccggatacggcgaccgtaaggcgctgatggtgagccgcgaacacgcggcgacctcgcgggccagggcggcggagcacgcggtgaacttaaccgccgtggcggccacgtttgggtgggcctcgaacagctgggcgaggtctgcgcccgggggctcgggcgagcggcgagtcttcagcgcctcgagggcctgtgaggacgccggaaccgtgggcccgtcgtcctcgcccgcctcggcgaccggcggcccggccgggtcggggggtgccgaggcgaggacaggctccggaacggaggcggggaccgcggccccgacgggggttttgcctttgggggtggatttcttcttggttttggcagggggggccgagcgtttcgttttctcccccgaagtcaggtcttcgacgctggaaggcggagtccaggtgggtcggcggcgcttgggaaggccggccgagtagcgtgcccggtgccgaccaaccgggacgacgcccatctccaggacccgcatgtcgtcgtcatcttcttcggccgcctctgcggcgggggtcttgggggcggagggaggcggtggtgggatcgcggagggtgggtcggcggagggtgggtcggcggaggggggatccgtgggtggggtacccttcagggccaccgcccatacatcgtcgggcgcccgattcgggcgcttggcctctggttttgccgacggaccggccgtcccccgggatgtctcggaggccctgtcgtcgcgacgggcccgggtcggtggcggcgactgggcggctgtgggcgggtgtggccccgggccccctaccccctcccgggggcccacgccgacgcagggctcccccaggcccgcgatctcgccccgcagggggtgcgtgatggccacgcgccgttcgctgaacgcttcgtcctgcaggtaagtctcgctggccccgtaaagatgcagagccgcggccgtcaagtccgcaggagccgcgggttccgggcccgacggcacgaaaaacaccatggctcccgcccaccgtacgtccgggcgatcgcgggtgtaatacgtcaggtatggatacatgtcccccgcccgcactttggcgatgaacgcgggggtgccctccggaaggccgtgcgggtcaaaaaggtatgcggtgtcgccgtccctgaacagccccatccctagggggccaatggttaggagcgtgtacgacagggggcgcagggcccacgggccggcgaagaacgtgtgtgcggggcattgtgtctccagcaggcccgccgcgggctccccgaagaagcccacctcgccgtatacgcgcgagaagacacagcgcagtccgccgcgcgcccctgggtactcgaggaagttggggagctcgacgatcgaacacatgcgcggcggcccagggcccgcggtcgcgcgcgtccactcgcccccctcgaccaaacatccctcgatggcctccgcggacaggacgtcgcgagggcccacatcaaatatgaggctgagaaaggacagcgacgagcgcatgcacgataccgacccccccggctccaggtcgggcgcgaactggttccgagcaccggtgaccacgatgtcgcgatcccccccgcgttccatcgtggagtgcggtggggtgcccgcgatcatatgtgccctgctggccagagacccggcctgtttatggaccggacccccggggttagtgttgtttccgccacccatgcccccgtaccatggccccggttcccctgattaggctacgagtcgcggtgatcgcttcccaaaaaccgagctgcgtttgtctgtcttggtcttccacccccccccccgcccgcccgcacaccataacaccgagaacaacacacgggggtgggcgtaacataataaagctttattggtaactagttaacggcaagtccgtgggtggcgcgacggtgtcctccgggatcatctcgtcgtcctcgacgggggtgttggaatgaggcgccccctcgcggtccgcctggcgtgggccgtgcccataggcctccggcttctgtgcgtccatgggcataggcgcggggagactgtttccggcgtcgcggacctccaggtccctgggagactccggtccggctaacggacgaaacgcggaagcgcgaaacacgccgtcggtgacccgcaggagctcgttcatcagtaaccaatccatactcagcgtaacggccagcccctggcgagacagatccacggagtccggaaccgcggtcgtctggcccagggggccgaggctgtagtccccccaggcccctaggtcgcgacggctcgtaagcacgacgcggtcggccgcggggctttgcgggggggcgtcctcgggcgcatgcgccattacctctcggatggccgcggcgcgctggtcggccgagctgaccaagggcgccacgaccacggcgcgctccgtctgcaggcccttccacgtgtcgtggagttcctggacaaactcggccacgggctcgggtcccgcggccgcgcgcgcggcttgatagcaggccgacagacgccgccagcgcgctagaaactgacccatgaagcaaaacccggggacctggtctcccgacagcagcttcgacgcccgggcgtgaatgccggacacgacggacagaaacccgtgaatttcgcgccggaccacggccagcacgttgtcctcgtgcgacacctgggccgccagctcgtcgcacacccccaggtgcgccgtggtttcggtgatgacggaacgcaggctcgcgagggacgcgaccagcgcgcgcttggcgtcgtgatacatgctgcagtactgactcaccgcgtcccccatggcctcggggggccagggccccaggcggtcgggcgtgtccccgaccaccgcatacaggcggcgcccgtcgctctcgaaccgacactcgaaaaaggcggagagcgtgcgcatgtgcagccgcagcagcacgatggcgtcctccagttggcgaatcagggggtctgcgcgctcggcgaggtcctgcagcaccccccgggcggccagggcgtacatgctaatcaacaggaggctggtgcccacctcggggggcggggggggctgcagctggaccaggggccgcagctgctcgacggcacccctggagatcacgtacagctcccggagcagctgctctatgttgtcggccatctgcatagtggggccgaggccgccccgggcggccggttcgaggagggtgatcagcgcgcccagtttggtgcgatggccctcaaccgtggggagatagcccagcccaaagtcccgggcccaggccaacacacgcagggcgaactcgaccgggcggggaaggtaggccgcgctacacgtggccctcagcgcgtccccgaccaccagggccagaacgtaggggacgaagcccgggtcggcgaggacgttggggtgaatgccctcgagggcggggaagcggatctgggtcgccgcggccaggtggacagagggggcgtggctgggctgcccgacggggagaagcgcggacagcggcgtggccggggtggtgggggtgatgtcccagtgggtctgaccatacacgtcgatccagatgagcgccgtctcgcggagaaggctgggttgaccggaactaaagcggcgctcggccgtctcaaactcccccacgagcgcccgccgcaggctcgccagatgttccgtcggcacggccggacccatgatacgcgccagcgtctggcttagaacgccccccgacaggccgaccgcctcgcagagccgcccgtgcgtgtgctcgctggcgccctggacccgcctgaaagtttttacgtagttggcatagtacccgtattcccgcgccaacccaaacacgttcgaccccgcgagggcaatgcacccaaagagctgctggacttcgccgagtccgtggccggtgggcgtccgcgcggggacgcccgccgccagaaacccctccagggccgaaaggtagtgcgtgcagtgcgagggcgtgaacccagcgtcgatcagggtgttgatcaccacggagggcgaattggtattctggatcaacgtccacgtctgctgcagcagagccagcagccgctgctgggcgccggcggagggctgctccccgagctgcagcaggctggagacggcaggctggaagactgccagtgccgacgaactcaggaacggcacgtcgggatcaaacacggccacgtccgtccgcacgcgcgccattagcgtccccgggggcgcacaggccgagcgcgggctgacgcggctgagggccgtcgacacgcgcacctcctcgcggctgcgaaccatcttgttggcctcgagcggcggaatcattatggccgggtcgatctcccgcacggtgtgctgaaactgcgccaacaggggcggcgggaccacagccccccgctcgggggtcgtcaggtactcgtccaccagggccaacgtaaagagggcccgtgtgaggggagtgagggtcgcgtcgtctatgcgctggaggtgcgccgagaacagcgtcacccgattactcaccagggccaagaaccggaggccctcttgcacgaacggggcggggaagagcaggctgtacgccggggtggtaaggttcgcgctgggctgccccaacgggaccggcgccatcttgagcgacgtctccccaagggcctcgatggaggtccgcgggctcatggccaagcagctcttggtgacggtttgccagcggtctatccactccacggcgcactggcggacgcggaccggccccagggccgccgcggtgcgcaggccggcggaatccagcgcatgggacgtgtcggagccggtgaccgcgaggatggtgtccttgatgacctccatctcccggaaggcctggtcgggggcctcggggagagccaccaccaagcggtgtacgagcaacccggggaggttctcggccaagagcgccgtctccggaagcccgtgggcccggtggagcgcgcacaggtgttccagcagcggccgccagcatgcccgcgcgtctgccggggcgatggccgttcccgacaacagaaacgccgccatggcggcgcgcagcttggccgtggccagaaacgccgggtcgtccgccccgtttgccgtctcggccgtgggggttggcggttggcgaaggccggctaggctcgccaataggcgctgcataggtccgtccgagggcggaccggcgggtgaggtcgtgacgacgggggcctcggacgggagaccgcggtctgccatgacgcccggctcgcgtgggtgggggacagcgtagaccaacgacgagaccgggcgggaatgactgtcgtgcgctgtagggagcggcgaattatcgatcccccgcggccctccaggacccccgcaggcgttgcgagtaccccgcgtcttcgcggggtgttatacggccacttaagtcccggcatcccgttcgcggacccaggcccgggggattgtccggatgtgcgggcagcccggacggcgtgggttgcggactttctgcggggcggcccaaatggccctttaaacgtgtgtatacggacgcgccgggccagtcggccaacacaacccaccggaggcggtagccgcgtttggctgtggggtgggtggttccgccttgcgtgagtgtcctttcgacccccccccccctccctcccccgggtcttgctaggtcgcgatctggggtcgcaatgaagaccaatccgctacccgcaaccccttccgtgtggggcgggagtaccgtggaactcccccccacaacacgcgataccgcgggacagggcctgcttcggcgcgtcctgcgccccccgatctctcgccgcgacggcccagggctccccagggggtcgggaccccggagggcggccagcacgctgtggttgcttggcctggacggcacagacgcgccccctggggcgctgacccccaacgacgataccgaacaggccctggacaagatcctgcggggcaccatgcgcgggggggcggccctgatcggctccccgcgccatcatctaacccgccaagtgatcctgacggatctgtgccaacccaacgcggatcgtgctgggacgctgcttctggcgctgcggcaccccgccgacctgcctcacctggcccaccagcgcgccccgccaggccggcagaccgagcggctgggcgaggcctggggccagctgatggaggcgaccgccctggggtcggggcgagccgagagcgggtgcacgcgcgcgggcctagtgtcgtttaacttcctggtggcggcgtgtgccgcctcgtacgacgcgcgcgacgccgccgatgcggtacgggcccacgtcacggccaactaccgcgggacgcgggtgggggcgcgcctggatcgtttttccgagtgtctgcgcgccatggttcacacgcacgtcttcccccacgaggtcatgcggtttttcggggggctggtgtcgtgggtcacccaggacgagctagcgagcgtcaccgccgtgtgcgccgggccccaggaggcggcgcacaccggccacccgggccggccccgctcggccgtgatcctcccggcatgtgcgttcgtggacctggacgccgagctggggctggggggcccgggcgcggcgtttctgtacctggtattcacttaccgccagcgccgggaccaggagctgtgttgtgtgtacgtgatcaagagccagctccccccgcgcgggttggagccggccctggagcggctgtttgggcgcctccggatcaccaacacgattcacggcaccgaggacatgacgcccccggccccaaaccgaaaccccgacttccccctcgcgggcctggccgccaatccccaaaccccgcgttgctcggctggccaggtcacgaacccccagttcgccgacaggctgtaccgctggcagccggacctgcgggggcgccccaccgcacgcacctgtacgtacgccgcctttgcagagctcggcatgatgcccgaggatagtccccgctgcctgcaccgcaccgagcgctttggggcggtcagcgtccccgttgtcattctggaaggcgtggtgtggcgccccggcgagtggcgggcatgcgcgtgagcgtagcaaacgccccgcccacacaacgctccgcccccaaccccttccccgctgtcactcgttgttcgttgacccgggcgtccgccaaataaagccactgaaacccgaaacgcgagtgttgtaacgtcctttgggcgggaggaagccacaaaatgcaaatgggatacatggaaggaacacacccccgtgactcaggacatcggtgtgtccttttgggtttcactgaaactggcccgcgccccacccctgcgcgatgtggataaaaagccagcgcgggtggtttagggtaccacaggtgggtgctttggaaacttgccggtcgccgtgctcctgtgagcttgcgtccctccccggtttcctttgcgctcccgccttccggacctgctctcgcctatcttctttggctctcggtgcgattcgtcaggcagcggccttgtcgaatctcgaccccaccactcgccggacccgccgacgtcccctctcgagcccgccgaaacccgccgcgtctgttgaaatggccagccgcccagccgcatcctctcccgtcgaagcgcgggccccggttgggggacaggaggccggcggccccagcgcagccacccagggggaggccgccggggcccctctcgcccacggccaccacgtgtactgccagcgagtcaatggcgtgatggtgctttccgacaagacgcccgggtccgcgtcctaccgcatcagcgatagcaactttgtccaatgtggttccaactgcaccatgatcatcgacggagacgtggtgcgcgggcgcccccaggacccgggggccgcggcatcccccgctcccttcgttgcggtgacaaacatcggagccggcagcgacggcgggaccgccgtcgtggcattcgggggaaccccacgtcgctcggcggggacgtctaccggtacccagacggccgacgtccccaccgaggcccttgggggcccccctcctcctccccgcttcaccctgggtggcggctgttgttcctgtcgcgacacacggcgccgctctgcggtattcgggggggagggggatccagtcggccccgcggagttcgtctcggacgaccggtcgtccgattccgactcggatgactcggaggacacggactcggagacgctgtcacacgcctcctcggacgtgtccggcggggccacgtacgacgacgcccttgactccgattcgtcatcggatgactccctgcagatagatggccccgtgtgtcgcccgtggagcaatgacaccgcgcccctggatgtttgccccgggacccccggcccgggcgccgacgccggtggtccctcagcggtagacccacacgcgccgacgccagaggccggcgctggtcttgcggccgatcccgccgtggcccgggacgacgcggaggggctttcggacccccggccacgtctgggaacgggcacggcctaccccgtccccctggaactcacgcccgagaacgcggaggccgtggcgcgctttctgggagatgccgtgaaccgcgaacccgcgctcatgctggagtacttttgccggtgcgcccgcgaggaaaccaagcgtgtcccccccaggacattcggcagcccccctcgcctcacggaggacgactttgggcttctcaactacgcgctcgtggagatgcagcgcctgtgtctggacgttcctccggtcccgccgaacgcatacatgccctattatctcagggagtatgtgacgcggctggtcaacgggttcaagccgctggtgagccggtccgctcgcctttaccgcatcctgggggttctggtgcacctgcggatccggacccgggaggcctcctttgaggagtggctgcgatccaaggaagtggccctggattttggcctgacggaaaggcttcgcgagcacgaagcccagctggtgatcctggcccaggctctggaccattacgactgtctgatccacagcacaccgcacacgctggtcgagcgggggctgcaatcggccctgaagtatgaggagttttacctaaagcgttttggcgggcactacatggagtccgtcttccagatgtacacccgcatcgccggctttttggcctgccgggccacgcgcggcatgcgccacatcgccctggggcgagaggggtcgtggtgggaaatgttcaagttctttttccaccgcctctacgaccaccagatcgtaccgtcgacccccgccatgctgaacctggggacccgcaactactacacctccagctgctacctggtaaacccccaggccaccacaaacaaggcgaccctgcgggccatcaccagcaacgtcagtgccatcctcgcccgcaacgggggcatcgggctatgcgtgcaggcgtttaacgactccggccccgggaccgccagcgtcatgcccgccctcaaggtccttgactcgctggtggcggcgcacaacaaagagagcgcgcgtccgaccggcgcgtgcgtgtacctggagccgtggcacaccgacgtgcgggccgtgctccggatgaagggggtcctcgccggcgaagaggcccagcgctgcgacaatatcttcagcgccctctggatgccagacctgtttttcaagcgcctgattcgccacctggacggcgagaagaacgtcacatggaccctgttcgaccgggacaccagcatgtcgctcgccgactttcacggggaggagttcgagaagctctaccagcacctcgaggtcatggggttcggcgagcagatacccatccaggagctggcctatggcattgtgcgcagtgcggccacgaccgggagccccttcgtcatgttcaaagacgcggtgaaccgccactacatctacgacacccagggggcggccatcgccggctccaacctctgcaccgagatcgtccatccggcctccaagcgatccagtggggtctgcaacctgggaagcgtgaatctggcccgatgcgtctccaggcagacgtttgactttgggcggctccgcgacgccgtgcaggcgtgcgtgctgatggtgaacatcatgatcgacagcacgctacaacccacgccccagtgcacccgcggcaacgacaacctgcggtccatgggaatcggcatgcagggcctgcacacggcctgcctgaagctggggctggatctggagtctgccgaatttcaggacctgaacaaacacatcgccgaggtgatgctgctgtcggcgatgaagaccagcaacgcgctgtgcgttcgcggggcccgtcccttcaaccactttaagcgcagcatgtatcgcgccggccgctttcactgggagcgctttccggacgcccggccgcggtacgagggcgagtgggagatgctacgccagagcatgatgaaacacggcctgcgcaacagccagtttgtcgcgctgatgcccaccgccgcctcggcgcagatctcggacgtcagcgagggctttgcccccctgttcaccaacctgttcagcaaggtgacccgggacggcgagacgctgcgccccaacacgctcctgctaaaggaactggaacgcacgtttagcgggaagcgcctcctggaggtgatggacagtctcgacgccaagcagtggtccgtggcgcaggcgctcccgtgcctggagcccacccaccccctccggcgattcaagaccgcgtttgactacgaccagaagttgctgatcgacctgtgtgcggaccgcgccccctacgtcgaccatagccaatccatgaccctgtatgtcacggagaaggcggacgggaccctcccagcctccaccctggtccgccttctggtccacgcatataagcgcggactaaaaacagggatgtactactgcaaggttcgcaaggcgaccaacagcggggtctttggcggcgacgacaacattgtctgcatgagctgcgcgctgtgaccgacaaaccccctccgcgccaggcccgccgccactgtcgtcgccgtcccacgctctcccctgctgccatggattccgcggccccagccctctcccccgctctgacggcccttacgggccagagcgcgacggcggacctggcgatccagattccaaagtgccccgaccccgagaggtacttctacacctcccagtgtcccgacattaaccacctgcgctccctcagcatccttaaccgctggctggaaaccgagcttgttttcgtgggggacgaggaggacgtctccaagctttccgagggcgagctcagcttttaccgcttcctcttcgctttcctgtcggccgccgacgacctggttacggaaaacctgggcggcctctccggcctgtttgagcagaaggacattctccactactacgtggagcaggaatgcatcgaagtcgtacactcgcgcgtgtacaacatcatccagctggtgcttttccacaacaacgaccaggcgcgccgcgagtacgtggccggtaccatcaaccacccggccatccgcgccaaggtggactggttggaagcgcgggtgcgggaatgcgcctccgttccggaaaagttcattctcatgatcctcatcgagggcatcttttttgccgcctcgtttgccgccatcgcctaccttcgcaccaacaaccttctgcgggtcacctgccagtcaaacgacctcatcagccgggacgaggccgtgcacacgacggcctcgtgttacatctacaacaactacctcggcgggcacgccaagcccccgcccgaccgcgtgtacgggctgttccgccaggcggtcgagatcgagatcggatttatccgatcccaggcgccgacggacagccatatcctgagcccggcggcgctggcggccatcgaaaactacgtgcgattcagcgcggatcgcctgttgggccttatccacatgaagccactgttttccgccccaccccccgacgccagctttccgctgagcctcatgtccaccgacaaacacaccaattttttcgagtgtcgcagcacctcctacgccggggcggtcgtcaacgatctgtgagtgtcgcggcgcgcttctacccgtgtttgcccataataaacctctgaaccaaactttgggtctcattgtgattcttgtcagggacgcgggggtgggagaggataaaaggcggcgcaaaaagcagtaaccaggtccgtccagattctgcgggcataggataccataattttattggtgggtcgtttgttcggggacaagcgcgctcgtctgacgtttgggctactcgtcccagaatttggccaggacgtccttgtagaacgcgggtgggggggcctgggtccgcaactgctccagaaacctgtcggcgatatcaggggccgtgatatgccgggtcacgatagatcgcgccaggttttcgtcgcggatgtcctggtagataggcaggcgtttcagaagagtccacggcccccgctccttggggccgataagcgatatgacgtacttaatgtagcggtgttccaccagctcggtgatggtcatgggatcggggagccagtccagggactctggggcgtcgtggatgacgtggcgtcgccggttggccacataactgcggtgctcttccagcagctgcgcgttcgggacctggacgagctcgggcggggtgagtatctccgaggaggacgacctggggccggggtggcccccggtaacgtcccggggatccagggggaggtcctcgtcgtcttcgtatccgccggcgatctgttgggttagaatttcggtccacgagacgcgcgtctcggtgccgccggcggccggcggcagagggggcctggtttccgtggagcgcgagctggtgtgttcccggcggatggcccgccgggtctgagagcgactcgggggggtccagtgacattcgcgcagcacatcctccacggaggcgtaggtgttattgggatggaggtcggtgtggcagcggacaaagagggccaggaactgggggtagctcatcttaaagtactttagtatatcgcgacagttgatcgtgggaatgtagcaggcgctaatatccaacacaatatcacagcccatcaacaggaggtcagtgtccgtggtgtacacgtacgcgaccgtgttggtgtgatagaggttggcgcaggcatcgtccgcctccagctgacccgagttaatgtaggcgtaccccagggcccggagaacgcgaatacagaacagatgcgccagacgcagggccggcttcgagggcgcggcggacggcagcgcggctccggacccggccgtcccccgggtccccgaggccagagaggtgccgcgccggcgcatgttggaaaaggcagagctgggtctggagtcggtgatgggggaaggcggtggagaggcgtccacgtcactggcctcctcgtccgtccggcactgggccgtcgtgcgggccaggatggccttggctccaaacacaaccggctccatacaattgaccccgcgatcggtaacgaagatggggaaaagggacttttgggtaaacacctttaataagcgacagaggcagtgtagcgtaatggcctcgcggtcgtaactggggtatcggcgctgatatttgaccaccaacgtgtacatgacgttccacaggtccacggcaatgggggtgaagtacccggccggggccccaaggccccggcgcttgaccagatggtgtgtgtgggcaaacttcatcatcccgaacaaacccatgtcaggtcaattgtaactgcggatcggcctaactaaggcgtggttggtgcgacggtccgggacacccgagcctgtctctctgtgtatggtgacccagacaacaacaccgacacaagaggacaataatccgttaggggacgctctttataatttcgatggcccaactccacgcggattggtgcagcaccctgcatgcgccggtgcgggccaaccttccccccgctcattgcctcttccaaaagggtgtggcctaacgagctgggggcgtatttaatcaggctagcgcggcgggcctgccgtagtttctggctcggtgagcgacggtccggttgcttgggtcccctggctgccatcaaaaccccaccctcgcagcggcatacgccccctccgcgtcccgcacccgagaccccggcccggctgccctcaccaccgaagcccacctcgtcactgtggggtgttcccagcccgcgttgggatgacggattcccctggcggtgtggcccccgcctcccccgtggaggacgcgtcggacgcgtccctcgggcagccggaggagggggcgccctgccaggtggtcctgcagggcgccgaacttaatggaatcctacaggcgtttgccccgctgcgcacgagccttctggactcgcttctggttatgggcgaccggggcatccttatccataacacgatctttggggagcaggtgttcctgcccctggaacactcgcaattcagtcggtatcgctggcgcggacccacggcggcgttcctgtctctcgtggaccagaagcgctccctcctgagcgtgtttcgcgccaaccagtacccggacctacgtcgggtggagttggcgatcacgggccaggccccgtttcgcacgctggttcagcgcatatggacgacgacgtccgacggcgaggccgttgagctagccagcgagacgctgatgaagcgcgaactgacgagctttgtggtgctggttccccagggaacccccgacgttcagttgcgcctgacgaggccgcagctcaccaaggtccttaacgcgaccggggccgatagtgccacgcccaccacgttcgagctcggggttaacggcaaattttccgtgttcaccacgagtacctgcgtcacctttgctgcccgcgaggagggcgtgtcgtccagcaccagcacccaggtccagatcctgtccaacgcgctcaccaaggcgggccaggcggccgccaacgccaagacggtgtacggggaaaatacccatcgcaccttctctgtggtcgtcgacgattgcagcatgcgggcggtgctccggcgactgcaggtcggcgggggcaccctcaagttcttcctcacgacccccgtccccagtctgtgcgtcaccgccaccggtcccaacgcggtatcggcggtatttctcctgaaaccccagaagatttgcctggactggctgggtcatagccaggggtctccttcagccgggagctcggcctcccgggcctctgggagcgagccaacagacagccaggactccgcgtcggacgcggtcagccacggcgatccggaagacctcgatggcgctgcccgggcgggagaggcgggggccttgcatgcctgtccgatgccgtcgtcgaccacgcgggtcactcccacgaccaagcgggggcgctcggggggcgaggatgcgcgcgcggacacggccctaaagaaacctaagacggggtcgcccaccgcacccccgcccgcagatccagtccccctggacacggaggacgactccgatgcggcggacgggacggcggcccgtcccgccgctccagacgcccggagcggaagccgttacgcgtgttactttcgcgacctcccgaccggagaagcaagccccggcgccttctccgccttccgggggggcccccaaaccccgtatggttttggattcccctgacggggcggggccttggcggccgcccaactctcgcaccatcccgggttaatgtaaataaacttggtattgcccaacactttcccgcgtgtcgcgtgtggttcatgtgtgtgcctggcgcccccaccctcgggttcgtgtatttcctttccctgtccttataaaagccgtatgtggggcgctgacggaaccaccccgcgtgccatcacggccaaggcgcgggatgctccgcaacgacagccaccgggccgtgtccccggaggacggccagggacgggtcgacgacggacggccacacctcgcgtgcgtgggggccctggcgcgggggttcatgcatatctggcttcaggccgccacgctgggttttgcgggatcggtcgttatgtcgcgcgggccgtacgcgaatgccgcgtctggggcgttcgccgtcgggtgcgccgtgctgggctttatgcgcgcaccccctcccctcgcgcggcccaccgcgcggatatacgcctggctcaaactggcggccggtggagcggcccttgttctgtggagtctcggggagcccggcacgcagccgggggccccggccccgggcccggccacccagtgcctggcgctgggcgccgcctatgcggcgctcctggtgctcgccgatgacgtctatccgctctttctcctcgccccggggcccctgttcgtcggcaccctggggatggtcgtcggcgggctgacgatcggaggcagcgcgcgctactggtggatcggtgggcccgccgcggccgccctggccgcggcggtgttggcgggcccgggggcgaccaccgccagggactgcttttccagggcttgccccgaccaccgccgcgtctgtgtcatcaccgcaggcgagtctctttcccgccgccccccggaggacccagagcgacccggggttcccgggcccccgtcccccccgaccccccaacgatcccacgggccgccggccgatgaggtcgcaccggccagggtcgcgcggcccgaaaacgtctgggtgcccgtggtcacctttctgggggcgggcgcgcttgccgtcaagacggtgcgagaacatgcccggggaacgccgggcccgggcctgccgctgtggccccaggtgtttctcggaggccatgtggcggtggccctgacggagctgtgtcaggcgcttgcgccctgggaccttacggacccgctgctgtttgttcacgccggactgcaggtcatcaacctcgggttggtgtttcggttttccgaggttgtcgtgtatgcggcgctagggggtgccgtgtggatttcgttggcgcaggtgctggggctccggcgtcgcctgcacaggaaggaccccggggacggggcccggttggcggcgacgcttcggggcctcttcttctccgtgtacgcgctggggtttggggtgggggtgctgctgtgccctccggggtcaacgggcgggcggtcgggcgattgatatatttttcaataaaaggcattagtcccgaagaccgccggtgtgtgatgatttcgccataacacccaaaccccggatggggcccgggtataaattccggaaggggacacgggctaccctcactatcgagggcgcttggtcgggaggccgcatcgaacgcacacccccatccggtggtccgtgtggaggtcgttttcagtgcccggtctcgctttgccgggaacgctagccgatccctcgcgagggggaggcgtcgggcatggccccggggcgggtgggccttgccgtggtcctgtggagcctgttgtggctcggggcgggggtgtccgggggctcggaaactgcctccaccgggcccacgatcaccgcgggagcggtgacgaacgcgagcgaggcccccacatcggggtcccccgggtcagccgccagcccggaggtcaccccacatcgaccccaaaccccaacaatgtcacacaaaacaaaaccacccccaccgagccggccagccccccaacaacccccaagcccacctccacgcccaaaagcccccccacgtccacccccgaccccaaacccaagaacaacaccacccccgccaagtcgggccgccccactaaaccccccgggcccgtgtggtgcgaccgccgcgacccattggcccggtacggctcgcgggtgcagatccgatgccggtttcggaattccacccgcatggagttccgcctccagatatggcgttactccatgggtccgtcccccccaatcgctccggctcccgacctagaggaggtcctgacgaacatcaccgccccacccgggggactcctggtgtacgacagcgcccccaacctaacggacccccacgtgctctgggcggagggggccggcccgggcgccgaccctccgttgtattctgtcaccgggccgctgccgacccagcggctgattatcggcgaggtgacgcccgcgacccagggaatgtattacttggcctggggccggatggacagcccgcacgagtacgggacgtgggtgcgcgtccgcatgttccgccccccgtctctgaccctccagccccacgcggtgatggagggtcagccgttcaaggcgacgtgcacggccgccgcctactacccgcgtaaccccgtggagtttgtctggttcgaggacgaccaccaggtgtttaacccgggccagatcgacacgcagacgcacgagcaccccgacgggttcaccacagtctctaccgtgacctccgaggctgtcggcggccaggtccccccgcggaccttcacctgccagatgacgtggcatcgcgactccgtgacgttctcgcgacgcaatgccaccgggctggccctggtgctgccgcggccaaccatcaccatggaatttggggtccggcatgtggtctgcacggccggctgcgtccccgagggcgtgacgtttgcctggttcctgggggacgacccctcaccggcggctaagtcggccgttacggcccaggagtcgtgcgaccaccccgggctggctacggtccggtccaccctgcccatttcgtacgactacagcgagtacatctgtcggttgaccggatatccggccgggattcccgttctagaacaccacggcagtcaccagcccccacccagggaccccaccgagcggcaggtgatcgaggcgatcgagtgggtggggattggaatcggggttctcgcggcgggggtcctggtcgtaacggcaatcgtgtacgtcgtccgcacatcacagtcgcggcagcgtcatcggcggtaacgcaagacccccccgttacctttttaatatctatatagtttggtcccccctctatcccgcccaccgctgggcgctataaagccgccaccctctcttccctcaggtcatccttggtcgatcccgaacgacacacggcgtggagcaaaacgcctccccctgagccgctttcctaccaacacaacggcatgcctctgcgggcatcggaacacgcctaccggcccctgggccccgggacaccccccatgcgggctcggctccccgccgcggcctgggttggcgtcgggaccatcatcgggggagttgtgatcattgccgcgttggtcctcgtgccctcgcgggcctcgtgggcactttccccatgcgacagcggatggcacgagttcaacctcgggtgcatatcctgggatccgacccccatggagcacgagcaggcggtcggcggctgtagcgccccggcgaccctgatcccccgcgcggctgccaaacagctggccgccgtcgcacgcgtccagtcggcaagatcctcgggctactggtgggtgagcggagacggcattcgggcctgcctgcggctcgtcgacggcgtcggcggtattgaccagttttgcgaggagcccgcccttcgcatatgctactatccccgcagtcccgggggctttgttcagtttgtaacttcgacccgcaacgcgctggggctgccgtgaggcgcgtgtactgcggtctgtctcgtctcctcttctccccttccctccccctccgcatcccaggatcacaccggtcaacgagggttgggggggtccggcacggacccaaaataataaacacacaatcacgtgcgataaaaagaacacgcggtcccctgtggtgtttttggttatttttattaaatctcgtcgacaaacagggggaaaggggcgtggtctagcgacggcagcacgggcggaggcgttcaccggctccggcgtccttcgcgtttaagcttggtcaggagggcgctcagggcggcgacgttggtcgggccgtcgttggtcagggcgttggctcgatggcgggcgaggacgggcgaggggctcaacggcgggggcgggggcccggtgcggcccgggggggaaaatagggcggatcccccccagtcgtacaggggattttccgcctcaatgtacggggaggccggcgctgcattcgccgtgttcacgcagacgttttcgtagacccgcatccatggtatttcctcgtagacacgccccccgtcctcgctcaccgtctcgtatattgactcgtcgtcctcgtagggggcgtgccgttcgcgggccgaggcggcgtgggtggctttgcggcgggcgtcgtcgtcgtcgtcgtcggccgtcagatacgtggcttccatctggtcgggttctccctccggggcgggtccccacacccgtggccgatcgaggctccccagagacgcgcgccggacgaggagggggcacgtcgccgccggcggtcgcctgtcgggtcccgcgacgttacgggccgggaggcgcgggggcacctcccccatgtgcgtgtaatacgtggccggctgtgtggccgcagcggggggctcggcgaccgggtcgttcgcatccggaagcgggggccccgcgccgtccgcgcggcgcctccggaacctccgggtggacgcgggggtcgagtgtaggcgaggtcgggggaggggcgggggctcgttgtcgcgccgcgcccgctgaatcttttcccgacaggtcccaccccccgcgcgatgcccccccgggccgctggccatgtcgtccgggggaggccccgcggaccacgtcgtccggcgagacgccacgagccgcaggatggactcgtagtggagcgacggcgccccgttgcggagcagatccgcggccagggcggccccgaaccaagccttgatgctcaactccatccgggcccagctgggggcggtcatcgtggggaacaggggggcggtggtccgacagaaacgctcctggctgtccaccgcggcccgcagatactcgttgttcaggctgtcggtggcccagacgccgtacccggtgagggtcgcgttgatgatatactgggcgtggtgatggacgatcgacagaacctccaccgtggatacgacggtatccacggtcccgtacgtaccgccgctccgcttgccggtctgccacaggttggctaggcgcgtcaggtggcccaggacgtcgctgaccgccgccctgagcgccatgcactgcatggagccggtcgtgccgctgggaccccggtccagatggcgcgcgaacgtttccgcgggcgcctccgggctgccgccgagcgggaggaaccggcgattggagggactcagccggtgacatacgtgcttgtccgtcgtccacagcatccaggacgcccaccggtacagcacggagacgtaggccaggagctcgttgagccgcagtgcggtgtcggtgctggggcggcttgggtccgccgggcgcataaagaacatgtactgctgaatccgatggagggcgtcgcgcaggccggccacggtggcggcgtacttggccgccacggccccgctcttgaacggggtgcgcgccagcagctttggcgccagggtgggccgcagcagcacgtgaaggctggggtcgcagtcgcccacggggtcctcggggacgtccaggccgctgggcaccaccgtctgcaggtacttccagtactgcgtgaggatggcgcggctcaactggccgccgggcagctccacctcgcccagcgcctgggtggcggccgaagcgtagtgccggatgtactcgtagtgcgggtcgctggcgagcccgtccacgatcaaactctcgggaaccgtgttgtgttgccgcgcggccaaccggacgctgcgatcggtgcaggtcagaaacgccggctgcgcgtcgtcggagcgctgccgcaaggcgcccacggccgcgctaaggagcccctccggggtggggagcagacacccgccgaagatgcgccgctcgggaacgcccgcgttgtcgccgcggatcaggttggcaggcgtcaggcaccgcgccagccgcagggagctcgcgccgcgcgtccggcgctgcatggtgacgcccgttcggtcgggacccgccggtcggagttatgccgcgtccagggccatcggggcgctttttatcgggaggagcttatgggcgtggcgggcctcccagcccggtcgcgcgcctccccgacacgtgcgcccgcagggcggcggccccctcgtctcccatcagcagtttcctaaactgggacatgatgtccaccacgcggacccgcgggcccaacacggacccgccgcttacgggggcgggggggaagggctccaggtccttgagaagaaaggcggggtctgccgtcccggacacgggggcccggggcgctgaggaggcggggcgcagatccacgtgctccgcggccgcgcggacgtccgcccagaacttggcgggggtggtgcgcgcgtacaggggctgggtcgctcggaggacgcacgcgtagcgcaggggggtgtacgtgcccacctcgggggccgtgaatcccccgtcaaacgcggccagtgtcacgcacgccaccacggtgtcggcaaagcccagcagccgctgcaggacgagcccggcggccagaatggcgcgcgtggccgccgcgtcgtcccggcgccggtgcgcgtccccgcacgcccgggcgtactttaaggtcacggtcgccagggccgtgtgcagcgcgtacaccgcagcgcccagcacggcgttgagcccgctgttggcgagcagccggcgcgctgcggtgtcgcccagcgcctcgtgctcggcccccacgaccgcggggcttcccaggggcagggcgcgaaacagctcctcccgcgccacgtccgcaaaggcggggtggtgcacgtgcgggtgcaggcgcgcccccacgaccaccgagagccactggaccgtctgctccgccatcaccgccagcacatccagcacgcgccccaggaaggcggcctcccgcgtcaaaacgcaccggacggcgtcgggattgaagcgggcgagcagggccccggtggccaggtacgtcatgcggccggcatagcgggcggccacgcgacagtcgcggtccagcagcgcgcgcaccccgggccagtacagcagggaccccagcgagctgcggaacaccgcggcgtcggggccggattggggggacactaacccccccgcgctcagtaacggcacggccgcggccccgacgggacgcaacgccgtgaggctcgcgaactgccgcctcagctcggccgccctgtcgtccaggtcagacccgcgcgcctccgcgtgaaggcgcgtcccgcacacccacccgttgatggccagccgcacgacggcatccgccaaaaagctcatcgcctgggcggggctggtttttgttcgacgatccgtcaggtcaagaatcccatcgcccgtgatataccaggccaacgcctcgccctgctgcagggtttggcggaaaaacaccgcggggttgtcgggggaggcgaagtgcatgacccccacgcgcgataacccgaacgcgctatccggacacgggtaaaacccggccggatgccccagggctagggcggagcgcacggactcgtcccacacggcaacctgaggggccagtcgatccaacgggaatgccgcccggagctccgggcccggcacgcgtccctccagaacctccaccttgggcggggaacgggccccgccgccgtcctccggcccgacggcttccgggtagtcgtcctcctcgtactgcagctcctctaggaacagcggcgacggcgccacccgcgaaccgccgacccgccccaaaatagcccgcgcgtcgacgggacccaggtatcccccctgccgggcctgcggaggaccgcggggaacctcatcatcatcgtccaggcgaccgcgcaccgactggctacgggccgcatcgggcccggggcgctgccgggacgctcggcgatgggatgtgggcggggcttccgacgcgcgccgtcgtcgggctcgcgggccttcccgtcgacggcgcacgggcggctcgtcgcccgccatctcctccagagcctctagctcgctgtcgtcatccccgcggaacaccgcacgcaggtaccccatgaaccccaccccatcgcccgctggctcgtccgccacgggcgaggcgcgggggcgggtggatgcgcgcctcctgcgccccgcgggttcgcgagccgacatggtggcgatagacgcgggttatcggatgtccgctaccccccaaaaaagaaaaagaccccacagcgcggatggaggccggggtaggtgccgccggaccccctcgcgatgggaatggacgggagcgacggggccggcgcaaaaaaacgcagtatctcccgcgaaggctacccgccgccccagcccccggccaaatgcggaaacggtcccgcgctctcgcctttatacgcgggccgccctgcgacacaatcacccgtccgtggtttcgaatctacacgacaggcccgcagacgcggctaacacacacgccggcaacccagaccccagtgggttggttgcgcggtcccgtctcctggctagttctttcccccaccaccaaataatcagacgacaaccgcaggttttgtaatgtatgtgctcgtgtttattgtggatacgaaccggtgacgggaggggaaaacccagacgggggatgcgggtccggtcgcgccccctacccaccgtactcgtcaattccaagggcatcggtaaacatctgctcaaactcgaagtcggccatatccagagcgccgtagggggcggagtcgtggggggtaaatcccggccccggggaatccccgtcccccaacatgtccagatcgaaatcgtctagcgcgtcggcatgcgccatcgccacgtcctcgccgtctaagtggagctcgtcccccaggctgacatcggtcgggggggccgtcgacagtctgcgcgtgtgtcccgcggggagaaaggacaggcgcggagccgccagccccgcctcttcgggggcgtcgtcgtccgggagatcgagcaggccctcgatggtagacccgtaattgtttttcgtacgcgcgcggctgtacgcgtgttcccgcatgaccgcctcggagggcgaggtcgtgaagctggaatacgagtccaacttcgcccgaatcaacaccataaagtacccagaggcgcgggcctggttgccatgcagggtgggaggggtcgtcaacggcgcccctggctcctccgtagccgcgctgcgcaccagcgggaggttaaggtgctcgcgaatgtggtttagctcccgcagccggcgggcctcgattggcactccccggacggtgagcgctccgttgacgaacatgaagggctggaacagacccgccaactgacgccagctctccaggtcgcaacagaggcagtcaaacaggtcgggccgcatcatctgctcggcgtacgcggcccataggatctcgcgggtcaaaaatagatacaaatgcaaaaacaaaacacgcgccagacgagcggtctctcggtagtacctgtccgcgatcgtggcgcgcagcatttctcccaggtcgcgatcgcgtccgcgcatgtgcgcctggcggtgcagctgccggacgctggcgcgcaggtaccggtacagggccgagcagaagttggccaacacggttcgatagctctcctcccgcgcccgtagctcggcgtggaagaaacgagagagcgcttcgtagtagagcccgaggccgtcgcgggtggccggaagcgtagggaaggccacgtcgccgtgggcgcgaatgtcgatttgggtgcgttcggggacgtacgcgtccccccattccaccacatcgctgggcagcgttgataggaatttacactcccggtacaggtcggcgttggtcggtagcgccgaaaacagatcctcgttccaggtatcgagcatggtacatagcgcggggcccgcgctaaagcccaagtcgtcgaggagacggttaaagagggcggcgggggggacgggcatgggtggggagggcatgagctgggcctggctcaggcgccccgttgcgtacagcgggggggccgccggggtgtttttgggacccccggccgggcgggggggcggtggcgaagcgccgtccgcgttcatgtcggcaaacagctcgtcgaccaagaggtccattgggtggggttgatacgggaaagacgatatcgggcttttgatgcgatcgtccccgcccgcccagagagtgtgggacgcccgacggcgcgggaagagaaaacccccaaacgcgttagaggaccggacggaccttatggggggaagtgggcagcgggaaccccgtccgttcccgaggaatgacagcccgtggtcgccaccacgcatttaagcaacccgcacgggccgccccgtacctcgtgacttccccccacattggctcctgtcacgtgaaggcgaaccgagggcggctgtccaacccaccccccgccacccagtcccggtccccgtcggattgggaaacaaaggcacgcaacgccaacaccgaatgaacccctgttggtgctttattgtctgggtacggaagttttcactcgacgggccgtctggggcgagaagcggagcgggctggggctcgaggtcgctcggtggggcgcgacgccgcagaacgccctcgagtcgccgtggccgcgtcgacgtcctgcaccacgtctggattcaccaactcgttggcgcgctgaagcaggtttttgccctcgcagaccgtcacgcggatggtggtgatgccaaggagttcgttgaggtcttcgtctgtgcgcggacgcgacatgtcccagagctggaccgccgccatccgggcatgcatggccgccaggcgcccgaccgcggcgcagaagacgcgcttgttaaagccggccacccggggggtccatggcgcgtcggggtttgggggggcggtgctaaagtgcagctttctggccagcccctgcgcgggtgtcttggatcgggttggcgccgtcgacgcgggggcgtctgggagtgcggcggattctggctgggccgatttcctgccgcgggtggtctccgccgccggggccgcgggggccttagtcgccacccgctgggttcggggggcccggggggcggtggtgggtgtgcgtccggcccctccggacccagcgggtggcggaggcgcccgcgcaggccccgggccggacaaaaccgccccggaaacgggacgccgcgtccgggggacctccgggtgttcgtcgtcttcggatgacgagcccccgtagagggcataatccgactcgtcgtactggacgaaacggacctcgcccctctggcgcgagcgtgtctgtagggcgccacggcgggaggtgtcaggcggactatcgggactcgccatacctgaagacggggtgtagtacagatcctcgtactcatcgcgcggaacctcccgcggacccgacttcacggagcggcgagaggtcatggttccacgaacacgctagggtcggatgcgcggacaattaggcctgggttcggacggcgggggtggtgcaggtgtggagaggtcgagcgataggggcggcccgggagagaagagagggtccgcaaaacccactggggatgcgtgagtggccctctgtgggcggtgggggagagtcttataggaagtgcatataaccacaacccatgggtctaaccaatccccaggggccaagaaacagacacgccccaaacggtctcggtttccgcgaggaaggggaagtcctgggacaccctccacccccacccctcaccccacacagggcgggttcaggcgtgcccggcagccagtagcctctggcagatctgacagacgtgtgcgataatacacacgcccatcgaggccatgcctacataaaagggcaccagggcccccggggcagacatttggccagtgttttgggtctcgcaccgcgcgcccccgatcccatcgcgcccgccctcctcgccgggcggctccccgcgcgggcccgcgtctcccgccgctaaggcgacgagcaagacaaacaacaggcccgcccgacagacccttctgggggggcccatcgtccctaacaggaagatgagtcagtggggatccggggcgatccttgtccagccggacagcttgggtcgggggtacgatggcgactggcacacggccgtcgctactcgcgggggcggagtcgtgcaactgaacctggtcaacaggcgcgcggtggcttttatgccgaaggttagcggggactccggatgggccgtcgggcgcgtctctctggacctgcgaatggctatgccggctgacttttgcgcgattattcacgcccccgcgctagccagccccgggcaccacgtaatactgggtcttatcgactcggggtaccgcggaaccgttatggccgtggtcgtagcgcctaaaaggacgcgggaatttgcccccgggaccctgcgggtcgacgtgacgttcctggacatcctggcgacccccccggccctcaccgagccgatttccctgcggcagttcccgcaactggcgcccccccctccaaccggggccgggatacgcgaagatccttggttggagggggcgctcggggccccaagcgtgactacggccctaccggcgcgacgccgagggcggtccctcgtctatgccggcgagctgacgccggttcagacggaacacggggacggcgtacgagaagccatcgccttccttccaaaacgcgaggaggatgccggtttcgacattgtcgtccgtcgcccggtcaccgtcccggcaaacggcaccacggtcgtgcagccatccctccgcatgctccacgcggacgccgggcccgcggcctgctatgtgttggggcggtcgtcgctcaacgcccgcggcctcctggtcgttcctacgcgctggctccccgggcacgtatgtgcgtttgttgtttacaaccttacgggggttcctgtgaccctcgaggccggcgccaaggtcgcccagctcctggttgcgggggcggacgctcttccttggatccccccggacaactttcacgggaccaaagcgcttcgaaactaccccaggggtgttccggactcaaccgccgaacccaggaacccgccgctcctggtgtttacgaacgagtttgacgcggaggcccccccgagcgagcgcgggaccgggggttttggctctaccggtatttagcccacagctttgggttcgttccgggcaataaaaaacgtttgtatcgcatctttcctgtgtgtagttgtttatgttggatgcctgtgggtctatcacacccgcccctccatcccacaaacacaaaacacacgggttggatgaaaacacgcatttattgacccaaaacacacggagctgctcgagatgggccagggcgaggtgcggttggggaggctgtaggtctgggaacggacacgcggggacacgattccggtttggggtccgggagggcgtcgccgtttcgggcggcaggcgccagcgtaacctccgggggcggcgtgtgggggtgccccaaggagggcgcctcggtcaccccaatcccccccgaccgggttcccccggcaaccccgaaggcggagaggccaagggcccgttcggcgatggccacatcctccatgaccacgtcactctcggccatgctccgaatagcctgggagacgagcacatccgcggacttgtcagccgcccccacggacatgtacatctgcaggatggtggccatacacgtgtccgccaggcgccgcatcttgtcctgatgggccgccacggccccgtcgatcgtgggggcctcgagcccggggtggtggcgcgccagtcgttctaggttcaccatgcaggcgtggtacgtgcgggccaaggcgcgggccttcacgaggcgtcgggtgtcgtccagggaccccagggcgtcatcgagcgtgatgggggcgggaagtagcgcgttaacgaccgccagggcctcctgcagccgcggctccgcctccgagggcggaacggccgcgcggatcatctcatattgttcctcggggcgcgctccccagccacatatagccccgagaagagaagccatcgcgggcgggtactggcccttgggcgcgcggacgcaatggggcaggaagacgggaaccgcggggagaggcgggcggccgggactcccgtggaggtgaccgcgctttatgcgaccgacgggtgcgttattacctcttcgatcgccctcctcacaaactctctactgggggccgagccggtttatatattcagctacgacgcatacacgcacgatggccgtgccgacgggcccacggagcaagacaggttcgaagagagtcgggcgctctaccaagcgtcgggcgggctaaatggcgactccttccgagtaaccttttgtttattggggacggaagtgggtgggacccaccaggcccgcgggcgaacccgacccatgttcgtctgtcgcttcgagcgagcggacgacgtcgccgcgctacaggacgccctggcgcacgggaccccgctacaaccggaccacatcgccgccaccctggacgcggaggccacgttcgcgctgcatgcgaacatgatcctggctctcaccgtggccatcaacaacgccagcccccgcaccggacgcgacgccgccgcggcgcagtatgatcagggcgcgtccctacgctcgctcgtggggcgcacgtccctgggacaacgcggccttaccacgctatacgtccaccacgaggtgcgcgtgcttgccgcgtaccgcagggcgtattatggaagcgcgcagagtcccttctggtttcttagcaaattcgggccggacgaaaaaagcctggtgctcaccactcggtactacctgcttcaggcccagcgtctggggggcgcgggggccacgtacgacctgcaggccatcaaggacatctgcgccacctacgcgattccccacgccccccgccccgacaccgtcagcgctgcgtccctgacctcgtttgccgccatcacgcggttctgttgcacgagccagtacgcccgcggggccgcggcggccgggtttccgctttacgtggagcgccgtattgcggccgacgtccgcgagaccagtgcgctggagaagttcataacccacgatcgcagttgcctgcgcgtgtccgaccgtgaattcattacgtacatctacctggcccattttgagtgtttcagccccccgcgcctagccacgcatcttcgggccgtgacgacccacgaccccaaccccgcggccagcacggagcagccctcgcccctgggcagggaggccgtggaacaatttttttgtcacgtgcgcgcccaactgaatatcggggagtacgtcaaacacaacgtgaccccccgggagaccgtcctggatggcgatacggccaaggcctacctgcgcgctcgcacgtacgcgcccggggccctgacgcccgcccccgcgtattgcggggccgtggactccgccaccaaaatgatggggcgtttggcggacgccgaaaagctcctggtcccccgcgggtggcccgcgtttgcgcccgccagtcccggggaggacacggcgggcggcacgccgcccccacagacctgcggaattgtcaagcgcctcctgagactggccgccacggaacagcagggccccacacccccggcgatcgcggcgcttatccgtaatgcggcggtgcagactcccctgcccgtctaccggatatccatggtccccacgggacaggcatttgccgcgctggcctgggacgactgggcccgcataacgcgggacgctcgcctggccgaagcggtcgtgtccgccgaagcggcggcgcaccccgaccacggcgcgctgggcaggcggctcacggatcgcatccgcgcccagggccccgtgatgccccctggcggcctggatgccggggggcagatgtacgtgaatcgcaacgagatattcaacggcgcgctggcaatcacaaacatcatcctggatctcgacatcgccctgaaggagcccgtcccctttcgccggctccacgaggccctgggccactttaggcgcggggctctggctgcggttcagctcctgtttcccgcggcccgcgtggaccccgacgcatatccctgttattttttcaaaagcgcatgtcggcccggcccggcgtccgtgggttccggcagcggactcggcaacgacgacgacggggactggtttccctgctacgacgacgccggtgatgaggagtgggcggaggacccgggcgccatggacacatcccacgatcccccggacgacgaggttgcctactttgacctgtgccacgaagtcggccccacggcggaacctcgcgaaacggattcgcccgtgtgttcctgcaccgacaagatcggactgcgggtgtgcatgcccgtccccgccccgtacgtcgtccacggttctctaacgatgcggggggtggcacgggtcatccagcaggcggtgctgttggaccgagattttgtggaggccatcgggagctacgtaaaaaacttcctgttgatcgatacgggggtgtacgcccacggccacagcctgcgcttgccgtattttgccaaaatcgcccccgacgggcctgcgtgcggaaggctgctgccagtgtttgtgatcccccccgcctgcaaagacgttccggcgtttgtcgccgcgcacgccgacccgcggcgcttccattttcacgccccgcccacctatctcgcttccccccgggagatccgtgtcctgcacagcctgggtggggactatgtgagcttctttgaaaggaaggcgtcccgcaacgcgctggaacactttgggcgacgcgagaccctgacggaggtcctgggtcggtacaacgtacagccggatgcgggggggaccgtcgaggggttcgcatcggaactgctggggcggatagtcgcgtgcatcgaaacccactttcccgaacacgccggcgaatatcaggccgtatccgtccggcgggccgtcagtaaggacgactgggtcctcctacagctagtccccgttcgcggtaccctgcagcaaagcctgtcgtgtctgcgctttaagcacggccgggcgagtcgcgccacggcgcggacattcgtcgcgctgagcgtcggggccaacaaccgcctgtgcgtgtccttgtgtcagcagtgctttgccgccaaatgcgacagcaaccgcctgcacacgctgtttaccattgacgccggcacgccatgctcgccgtccgttccctgcagcacctctcaaccgtcgtcttgataacggcgtacggcctcgtgctcgtgtggtacaccgtcttcggtgccagtccgctgcaccgatgtatttacgcggtacgccccaccggcaccaacaacgacaccgccctcgtgtggatgaaaatgaaccagaccctattgtttctgggggccccgacgcacccccccaacgggggctggcgcaaccacgcccatatctgctacgccaatcttatcgcgggtagggtcgtgcccttccaggtcccacctgacgccatgaatcgtcggatcatgaacgtccacgaggcagttaactgtctggagaccctatggtacacacgggtgcgtctggtggtcgtagggtggttcctgtatctggcgttcgtcgccctccaccaacgccgatgtatgtttggcgtcgtgagtcccgcccacaagatggtggccccggccacctacctcttgaactacgcaggccgcatcgtatcgagcgtgttcctgcagtacccctacacgaaaattacccgcctgctctgcgagctgtcggtccagcggcaaaacctggttcagttgtttgagacggacccggtcaccttcttgtaccaccgccccgccatcggggtcatcgtaggctgcgagttgatgctacgctttgtggccgtgggtctcatcgtcggcaccgctttcatatcccggggggcatgtgcgatcacataccccctgtttctgaccatcaccacctggtgttttgtctccaccatcggcctgacagagctgtattgtattctgcggcggggcccggcccccaagaacgcagacaaggccgccgccccggggcgatccaaggggctgtcgggcgtctgcgggcgctgctgttccatcatcctctcgggcatcgcagtgcgattgtgttatatcgccgtggtggccggggtggtgctcgtggcgcttcactacgagcaggagatccagaggcgcctgtttgatgtatgacgtcacatccaggccggcggaaaccgtaacggcatatgcaaattggaaactgtcctgtcttggggcccacccacccgacgcgtcatatgcaaatgaaaatcggtcccccgaggccacgtgtagcctggatcccaacgaccccgcccatgggtcccaattggccgtcccgttaccaagaccaacccagccagcgtatccacccccgcccgggtccccgcggaagcggaacggggtatgtgatatgctaattaaatacatgccacgtacttatggtgtctgattggtccttgtctgtgccggaggtggggcgggggccccgcccggggggcggaacgaggaggggtttgggagagccggccccggcaccacgggtataaggacatccaccacccggccggtggtggtgtgcagccgtgttccaaccacggtcacgcttcggtgcctctccccgattcgggcccggtcgctcgctaccggtgcgccaccaccagaggccatatccgacaccccagccccgacggcagccgacagcccggtcatggcgactgacattgatatgctaattgacctcggcctggacctctccgacagcgatctggacgaggacccccccgagccggcggagagccgccgcgacgacctggaatcggacagcagcggggagtgttcctcgtcggacgaggacatggaagacccccacggagaggacggaccggagccgatactcgacgccgctcgcccggcggtccgcccgtctcgtccagaagaccccggcgtacccagcacccagacgcctcgtccgacggagcggcagggccccaacgatcctcaaccagcgccccacagtgtgtggtcgcgcctcggggcccggcgaccgtcttgctcccccgagcagcacgggggcaaggtggcccgcctccaacccccaccgaccaaagcccagcctgcccgcggcggacgccgtgggcgtcgcaggggtcggggtcgcggtggtcccggggctgccgatggtttgtcggacccccgccggcgtgcccccagaaccaatcgcaaccctgggggaccccgccccggggcggggtggacggacggccccggcgccccccatggcgaggcgtggcgcggcagtgagcagcccgacccacccggaggccagcggacacggggcgtgcgccaagcaccccccccgctaatgacgctggcgattgcccccccgcccgcggacccccgcgccccggccccggagcgaaaggcgcccgccgccgacaccatcgacgccaccacgcggttggtcctgcgctccatctccgagcgcgcggcggtcgaccgcatcagcgagagctttggccgcagcgcacaggtcatgcacgacccctttggggggcagccgtttcccgccgcgaatagcccctgggccccggtgctggcgggccaaggagggccctttgacgccgagaccagacgggtctcctgggaaaccttggtcgcccacggcccgagcctctatcgcacttttgccggcaatcctcgggccgcatcgaccgccaaggccatgcgcgactgcgtgctgcgccaagaaaatttcatcgaggcgctggcctccgccgacgagacgctggcgtggtgcaagatgtgcatccaccacaacctgccgctgcgcccccaggaccccattatcgggacggccgcggctgtgctggataacctcgccacgcgcctgcggccctttctccagtgctacctgaaggcgcgaggcctgtgcggcctggacgaactgtgttcgcggcggcgtctggcggacattaaggacattgcatccttcgtgtttgtcattctggccaggctcgccaaccgcgtcgagcgtggcgtcgcggagatcgactacgcgacccttggtgtcggggtcggagagaagatgcatttctacctccccggggcctgcatggcgggcctgatcgaaatcctagacacgcaccgccaggagtgttcgagtcgtgtctgcgagttgacggccagtcacatcgtcgcccccccgtacgtgcacggcaaatatttttattgcaactccctgttttaggtacaataaaaacaaaacatttcaaacaaatcgcccctcgtgttgtccttctttgctcatggccggcggggcgtgggtcacggcagatggcgggggtgggcccggcgtacggcctgggtgggcggagggaactaacccaacgtataaatccgtccccgttccaaggccggtgtcatagtgcccttaggagcttcccgcccgggcgcatccccccttttgcactatgacagcgacccccctcaccaacctgttcttacgggccccggacataacccacgtggcccccccttactgcctcaacgccacctggcaggccgaaacggccatgcacaccagcaaaacggactccgcttgcgtggccgtgcggagttacctggtccgcgcctcctgtgagaccagcggcacaatccactgctttttctttgcggtatacaaggacacccaccacacccctccgctgattaccgagctccgcaactttgcggacctggttaaccacccgccggtcctacgcgaactggaggataagcgcggggtgcggctgcggtgtgcgcggccgtttagcgtcgggacgattaaggacgtctctgggtccggcgcgtcctcggcgggagagtacacgataaacgggatcgtgtaccactgccactgtcggtatccgttctcaaaaacatgctggatgggggcctccgcggccctacagcacctgcgctccatcagctccagcggcatggccgcccgcgcggcagagcatcgacgcgtcaagattaaaattaaggcgtgatctccaacccccccatgaatgtgtgtaaccccccccaaaaaaataaagagccgtaacccaaccaaaccaggcgtggtgtgagtttgtggacccaaagccctcagagacaacgcgacaggccagtatggaccgtgatacttttatttattaactcacaggggcgcttaccgccacaggaataccagaataatgaccaccacaatcgcgaccaccccaaatacagcatggcgccacaccacgccacaacagccctgtcgccggtatggggcatgatcagacgagccgcgcgccgcgcgttgggccctgtacagctcgcgcgaattgaccctaggaggccgccacgcgcccgagttttgcgttcgtcgctggtcgtcgggcgccaaagccccggacggctgttcggtcgaacgaacggccacgacagtggcataggttggggggtggtccgacatagcctcggcgtacgtcgggaggcccgacaagaggtcccttgtgatgtcgggtggggccacaagcctggtttccggaagaaacaggggggttgccaataacccgccagggccaaaactccggcgctgcgcacgtcgttcggcgcggcgccgggcgcgccgagcggctcgctgggcggcttggcgtgagcggccccgctccgacgcctcgccctctccggaggaggttggcggaattggcacggacaacaggggcccagcagagtacggtggaggtgggtccgtgggggtgtccagatcaataacgacaaacggcccctcgttcctaccagacaagctatcgtaggggggcgggggatcagcaaacgcgttccccgcgctccataaacccgcgtcgggttgcgccgcctccgaagccatggatgcgccccaaagccacgactcccgcgcgctaggtccttggggtaatggaaaaggccctactccccatccaagccagccaagttaacgggctacgccttcgggaatgggactggcaccccggcggattttgttgggctggcatgcgtcgcccaaccgagggccgcgtccacgggacgcgccttttataaccccgggggtcattcccaacgatcacatgcaatctaactggctcccctctccccccctctcccctctccccccctctcccctctccccccctctcccctctccccccctctcccctctccccccctctcccctctccccccctctcccctctccccccctctcccctctccccccctctcccctctccccccctctcccctctccccccctctcccctctcccctctgctctttccccgtgacacccgacgctgggggcgtggctgccgggaggggccgcggatgggcgggcctacttggtctcccgccccccccccccccccccgaaccgccccgccggctttgcccccctttgatcccctgctacccccaacccgtgctggtggtgcgggttggggggggatgtgggcgggggtgcgcgggaggtgtcggtggtggtggtggtggtggtagtaggaatggtggtgagggggggggggcgctggttggtcaaaaaagggagggacgggggccggcagaccgacggcgacaacgctccccggcggccgggtcgcggctcttacgagcggcccggcccgcgctcccaccccccgggccgtgtccttgctttccccccgtctcccccccccccgccttctcctcctcctcctcgtttttccaaaccccgcccacccggcccggcccggcccggcccggcccggccaccgccgcccacccacccacctcgggatacccagccccggtcccccgttccccgggggccgttatctccagcgccccgtccggcgcgccgccccccgccgctaaaccccatcccgcccccgggaccccacatataagcccccagccacacgcaagaacagacacgcagaacggctgtgtttatttaaataaaccaatgtcggaataaacaaacacaaacacccgcgacggggggacggaggggacggagggagggggtgacgggggacgggaacagacacaaaaacaaccacaaaaaacaaccacccaccgacacccccaccccagtctcctcgccttctcccacccaccccacgcccccactgagcccggtcgatcgacgagcacccccgcccacgcccccgcccctgccccggcgacccccggcccgcacgatcccgacaacaataacaaccccaacggaaagcggcggggtgttgggggaggcgaggaacaaccgaggggaacgggggatggaaggacgggaagtggaagtcctgatacccatcctacacccccctgccttccaccctccggccccccgcgagtccacccgccggccggctaccgagaccgaacacggcggccgccgcagccgccgcagccgccgccgacaccgcagagccggcgcgcgcactcacaagcggcagaggcagaaaggcccagagtcattgtttatgtggccgcgggccagcagacggcccgcgacaccccccccccgcccgtgtgggtatccggccccccgccccgcgccggtccattaagggcgcgcgtgcccgcgagatatcaatccgttaagtgctctgcagacaggggcaccgcgcccggaaatccattaggccgcagacgaggaaaataaaattacatcacctacccacgtggtgctgtggcctgtttttgctgcgtcatctcagcctttataaaagcgggggcgcggccgtgccgatcgcgggtggtgcgaaagactttccgggcgcgtccgggtgccgcggctctccgggcccccctgcagccggggcggccaaggggcgtcggcgacatcctccccctaagcgccggccggccgctggtctgttttttcgttttccccgtttcgggggtggtgggggttgcggtttctgtttctttaacccgtctggggtgtttttcgttccgtcgccggaatgtttcgttcgtctgtcccctcacggggcgaaggccgcgtacggcccgggacgaggggcccccgaccgcggcggtccgggccccgtccggacccgctcgccggcacgcgacgcgaaaaaggccccccggaggcttttccgggttcccggcccggggcctgagatgaacactcggggttaccgccaacggccggcccccgtggcggcccggcccggggccccggcggacccaaggggccccggcccggggccccacaacggcccggcgcatgcgctgtggtttttttttcctcggtgttctgccgggctccatcgcctttcctgttctcgcttctccccccccccttcttcacccccagtaccctcctccctcccttcctcccccgttatcccactcgtcgagggcgccccggtgtcgttcaacaaagacgccgcgtttccaggtaggttagacacctgcttctccccaatagaggggggggacccaaacgacagggggcgccccagaggctaaggtcggccacgccactcgcgggtgggctcgtgttacagcacaccagcccgttcttttccccccctcccacccttagtcagactctgttacttacccgtccgaccaccaactgcccccttatctaagggccggctggaagaccgccagggggtcggccggtgtcgctgtaaccccccacgccaatgacccacgtactccaagaaggcatgtgtcccaccccgcctgtgtttttgtgcctggctctctatgcttgggtcttactgcctggggggggggagtgcgggggagggggggtgtggaaggaaatgcacggcgcgtgtgtaccccccctaaagttgttcctaaagcgaggatacggaggagtggcgggtgccgggggaccggggtgatctctggcacgcgggggtgggaagggtcgggggagggggggatggagtaccggcccacctggccggcgcgggtgcgcgtgcctttgcacaccaaccccacgtcccccggcggtctctaagaagcaccgccccccctccttcataccaccgagcatgcctgggtgtgggttggtaaccaacacgcccatcccctcgtctcctgtgattctctggctgcaccgcattcttgttttctaactatgttcctgtttctgtctcccccccccccacccctccgccccaccccccaacacccacgtctgtggtgtggccgacccccttttgggcgccccgtcccgccccgccacccctcccatcctttgttgccctatagtgtagttaaccccccccgccctttgtggcggccagaggccaggtcagtccgggcgggcaggcgctcgcggaaacttaacacccacacccaacccactgtggttctggctccatgccagtggcaggatgctttcggggatcggtggtcaggcagcccgggccgcggctctgtggttaacaccagagcctgcccaacatggcacccccactcccacgcacccccactcccacgcacccccactcccacgcacccccactcccacgcacccccactcccacgcacccccactcccacgcacccccactcccacgcacccccactcccacgcacccccactcccacgcatccccgcgatacatccaacacagacagggaaaagatacaaaagtaaacctttatttcccaacagacagcaaaaatcccctgagtttttttttattagggccaacacaaaagacccgctggtgtgtggtgcccgtgtctttcacttttcccctccccgacacggattggctggtgtagtgggcgcggccagagaccacccagcgcccgacccccccctccccacaaacacggggggcgtcccttattgttttccctcgtcccgggtcgacgccccctgctccccggaccacgggtgccgagaccgcaggctgcggaagtccagggcgcccactagggtgccctggtcgaacagcatgttccccacgggggtcatccagaggctgttccactccgacgcgggggccgtcgggtactcggggggcatcacgtggttacccgcggtctcggggagcagggtgcggcggctccagccggggaccgcggcccgcagccgggtcgccatgtttcccgtctggtccaccaggaccacgtacgccccgatgttccccgtctccatgtccaggatgggcaggcagtcccccgtgatagtcttgttcacgtaaggcgacagggcgaccacgctagagacccccgagatgggcaggtagcgcgtgaggccgcccgcggggacggccccggaagtctccgcgtggcgcgtcttccgggcacacttcctcggcccccgcggcccagaagcagcgcgggggccgagggaggtttcctcttgtctccctcccagggcaccgacggccccgcccgaggaggcggaagcggaggaggacgcggccccggcggcggaagaggcggcccccgcgggggtcggggccgaggaggaagaggcagaggaggaagaggcggaggccgccgaggacgtcaggggggtcccgggcccaccctggccgcgcccccccggccctgagtcggagggggggtgcgtcgccgccctcttggcccctgccggcgcgagggggggacgcgtggactggggggaggggttttcctggcccgacccgcgcctcttcctcggacgcaccgccgcctcctgctcgacagaggcggcggaggggagcggggcggcgccggagggggcggcgccgcgggagggcccgtgcccaccctccacgcccggcccccccgagccgcgcgccaccgtcgcacgcgcccggcacagactctgttcttggttcgcggcctgagccagggacgagtgcgactggggcacacggcgcgcgtccgcggggcgggcggccggctccgccccgggggccggggcgcgggggccgggccccggaggcggcgctcgcacgcacggggccacggccgcgcgggggcgcgcgggtcccgacgcggccgcggacgcggggggcccggggcggggggcggagcctggcatgggcgccgcggggggcctgtggggagaggccgggggggagtcgctgatcactatggggtctctgttgtttgcaaggggggcgggtctgttgacaagggggcccgtccggcccctcggccgccccgcctccgcttcaacaaccccaaccccaaccccaacccccccggaggggccagacgccccccgcggcgccgcggctcgcgactggcgggagccgccgccgccgctgctgttggtggtggtgttggtgttactgctgccgtgtggcccgatgggcgccgaggggggcgctgtccgagccgcggccggctggggggctgcgtgagacgccccgcccgtcacggggggcgcggcggcgcctctgcgtgggggggcgcggggcgtccggcggggggcgggcggtacgtagtctgctgcaagagacaacggggggcgcgatcaggttacgccccctccccggcccgccctttcctcgcccgcccgcctattcctccctccccccccctcctcctcctcctcccccagggtccttgccgccccccgcctcacaaaataatgctttatttgtgaaatttgtgatgctattgctttatttcactcctggactggctcccagcagtcaaaggggatgacaagcagaaagtccttcaggttctctttgaaactttcaaaggtgataatctgggttgcacaggaagtttccggggttggagggcagtgctgcttgtagtggctggccatcatggtcaaggggcccttgagcttggtgaggctgccccgcaggccctgcttgtacagctccaggcgggtctgtaggcaggtcggctcctggaggtcaaacatttctgagatgacttctactgtttcattcatctcagcagcagtgtctctactcaggttcaggagacgccgggcctcctggatggcattcacatgctcccagggctgcgtgctggggctgggcgagcgggcgggtgcagagatgctgcaggccacagtgcccaagagcagcaggctctgcagccacatcgatctgacggttcactaaacgagctctgcttatatagacctcccaccgtacacgcctaccgcccatttgcgtcaatggggcggagttgttacgacattttggaaagtcccgttgattttggtgccaaaacaaactcccattgacgtcaatggggtggagacttggaaatccccgtgagtcaaaccgctatccacgcccattgatgtactgccaaaaccgcatcaccatggtaatagcgatgactaatacgtagatgtactgccaagtaggaaagtcccataaggtcatgtactgggcataatgccaggcgggccatttaccgtcattgacgtcaatagggggcgtacttggcatatgatacacttgatgtactgccaagtgggcagtttaccgtaaatactccacccattgacgtcaatggaaagtccctattggcgttactatgggaacatacgtcattattgacgtcaatgggcgggggtcgttgggcggtcagccaggcgggccatttaccgtaagttatgtaacgcggaactccatatatgggctatgaactaatgaccccgtaattgattactattaataactgggggtcgtatgcggctggagggtcgcggacggagggtccctgggggtcgcaacgtaggcggggcttctgtggtgatgcggagagggggcggcccgagtctgcctggctgctgcgtctcgctccgagtgccgaggtgcaaatgcgaccagactgtcgggccagggctaacttataccccacgcctttcccctccccaaaggggcggcagtgacgattcccccaatggccgcgcgtcccaggggaggcaggcccaccgcggggcggccccgtccccggggaccaacccggcgcccccaaagaatatcattagcatgcacggcccggcccccgatttgggggcccaacccggtgtcccccaaagaaccccattagcatgcccctcccgccgacgcaacaggggcttggcctgcgtcggtgccccggggcttcccgccttcccgaagaaactcattaccatacccggaaccccaggggaccaatgcgggttcattgagcgacccgcgggccaatgcgcgaggggccgtgtgttccgccaaaaaagcaattagcataacccggaaccccaggggagtggttacgcgcggcgcgggaggcggggaataccggggttgcccattaagggccgcgggaattgccggaagcgggaagggcggccggggccgcccattaatgagtttctaattaccataccgggaagcggaacaaggcctcttgcaagtttttaattaccataccgggaagtgggcggcccggcccattgggcggtaactcccgcccaatgggccgggccccgaagactcggcggacgctggttggccgggccccgccgcgctggcggccgccgattggccagtcccgcccccgaggcgggcccgccctgtgagggcgggctggctccaagcgtatatatgcgcggctcctgccatcgtctctccggagagcggcttggtgcggagctcccgggagctccgcggaagacccaggccgcctcgggtgtaacgttagaccgagttcgccgggccggctccgcgggccagggcccgggcacgggcctcgggccccaggcacggcccgatgaccgcctcggcctccgccacccggcgccggaaccgagcccggtcggcccgctcgcgggcccacgagccgcggcgcgccaggcgggcggccgaggcccagaccaccaggtggcgcacccggacgtggggcgagaagcgcacccgcgcgggggtcgcgggggtcgcgggggtcgcgggggtcgcgggggtcgcggggggctccggcgccccctccccgcccgcgcgtcgcaggcgcaggcgcgccaggtgctccgcggtgacgcgcaggcggagggcgaggcgcggcggaaggcggaaggggcgcgagggggggtgggaggggtcagccccgccccccgggcccacgccgggcggtgggggccggggccggggggcggcggcggtgggccgggcctctggcgccggctcgggcggggggctgtccggccagtcgtcgtcatcgtcgtcgtcggacgcggactcgggaacgtggagccactggcgcagcagcagcgaacaagaaggcgggggcccaccggcggggggcggcggcggggcggccgcgggcgcgctcctgaccgcgggttccgagttgggcgtggaggttacctgggactgtgcggttgggacggcgcccgtgggcccgggcggccgggggcggcgggggccgcgatggcggcggcggcgggccatggagacagagagcgtgccggggtggtagagtttgacaggcaagcatgtgcgtgcagaggcgagtagtgcttgcctgtctaactcgctagtctcggccgcggggggcccgggctgcccgccgccgccgctttaaagggccgcgcgcgacccccggggggtgtgttttggggggggcccgttttcggggtctggccgctcctccccccgctcctccccccgctcctccccccgctcctccccccgctcctccccccgctcctccccccgctcctccccccgctcctccccccgctcctccccccgctcctccccccgctcctccccccgctcctccccccgctcctccccccgctcctccccccgctcctccccccgctcctccccccgctcctccccccgctcctccccccgctcccgcggccccgccccccacgcccgccgcgcgcgcgcacgccgcccggaccgccgcccgccttttttgcgcgcgcgcgcgcccgcggggggcccgggctgccacaggtgaaaccaacagagcacggcgcactccgcacgtcacacgtcacgtcatccaccacacctgcccaacaacacaactcacagcgacaactcaccgcgcaacaactcctgttcctcatccacacgtcaccgcgcacctcccgctcctccagacgtaccccggcgcaacacaccgctcctgctacacaccaccgcccctccccagccccagccctccccggccccagccctccccggccccagccctccccggccccagccctccccggccccagccctccccggccccagccctccccggccccagccctccccggccccagccctccccggccgcgtcccgcgctccctcgggggggttcgggcatctctacctcagtgccgccaatctcaggtcagagatccaaaccctccgggggcgcccgcgcaccaccaccgcccctcgccccctcccgcccctcgccccctcccgcccctcgccccctcccgcccctcgccccctcccgcccctcgccccctcccgcccctcgccccctcccgcccctcgccccctcccgcccctcgccccctcccgcccctcgccccctcccgcccctcgccccctcccgcccctcgccccctcccgcccctcgccccctcccgcccctcgccccctcccgcccctcgccccctcccgcccctcgccccctcccgcccctcgccccctcccgcccctcgccccctcccgcccctcgccccctcccgcccctcgccccctcccgcccctcgaataaacaacgctactgcaaaacttaatcaggttgttgccgtttattgcgtcttcgggtctcacaagcgccccgccccgtcccggcccgttacagcaccccgtccccctcgaacgcgccgccgtcgtcttcgtcccaggcgccttcccagtccacaacttcccgccgcgggggcgtggccaagcccgcctccgcccccagcacctccacggcccccgccgccgccagcacggtgccgctgcggcccgtggccgaggcccagcgaatcccgggcggcgccggcggcagggcccccgggccgtcgtcgtcgccgcgcagcaccagcgggggggcgtcgtcgtcgggctccagcagggcgcgggcgcaaaagtccctccgcggcccgcgccaccgggccgggccggcgcgcaccgcctcgcgccccagcgccacgtacacgggccgcagcggcgcgcccaggccccagcgcgcgcaggcgcggtgcgagtgggcctcctcctcgcagaagtccggcgcgccgggcgccatggcgtcggtggtccccgaggccgccgcccggccgtccagcgccggcagcacggcccggcggtactcgcgcggggacatgggcaccggcgtgtccgggccgaagcgcgtgcgcacgcggtagcgcacgttgccgccgcggcacaggcgcagcggcggcgcgtcggggtacaggcgcgcgtgcgcggcctccacgcgcgcgaagacccccgggccgaacacgcggcccgaggccagcaccgtgcggcgcaggtcccgcgccgccggccagcgcacggcgcactgcacggcgggcagcagctcgcacgccaggtaggcgtgctgccgcgacaccgcgggcccgtcggcgggccagtcgcaggcgcgcacggtgttgaccacgatgagccgccggtcgccggcgctggcgagcagccccagaaactccacggccccggcgaaggccaggtcccgcgtggacagcagcagcacgccctgtgcgcccagcgccgacacgtcgggggcgccggtccagttgcccgcccaggcggccgtgtccggcccgcacagccggttggccagggccgccagcaggcaggacagcccgccgcgctcggcggaccactccggcggcccccccgaggccccgccgccggccaggtcctcgcccggcagcggcgagtacagcaccaccacgcgcacgtcctcggggtcggggatctggcgcatccaggccgccatgcggcgcagcgggcccgaggcgcgcagggggccaaagaggcggcccccggcggccccgtgggggtgggggttatcgtcgtcgtcgccgccgccgcacgcggcctgggcggcgggggcgggcccggcgcaccgcgcggcgatcgaggccagggcccgcgggtcaaacatgagggccggtcgccaggggacggggaacagcgggtggtccgtgagctcggccacggcgcgcggggagcagtaggcctccagggcggcggccgcgggcgccgccgtgtggctgggccccgggggctgccgccgccagccgcccagggggtcggggccctcggcgggccggcgcgacagcgccacggggcgcgggcgggcctgcgccgcggcggcccggggcgccgcgggctgggcgggggcgggctcgggccccgggggcgtggaggggggcgcgggcgcggggaggggggcgcgggcgtccgagccgggggcgtccgcgccgctcttcttcgtcttcgggggtcgcgggccgccgcctccgggcggccgggccgggccgggactcttgcgcttgcgcccctcccgcggcgcggcggaggcggcggcggccgccagcgcgtcggcggcgtccggtgcgctggccgccgccgccagcagggggcgcaggctctggttgtcaaacagcaggtccgcggcggcggcggccgcggagctcggcaggcgcgggtcccgcggcagcgcggggcccagggccccggcgaccaggctcacggcgcgcacggcggccacggcggcctcgctgccgccggccacgcgcaggtccccgcgcaggcgcatgagcaccagcgcgtcgcgcacgaaccgcagctcgcgcagccacgcgcgcaggcggggcgcgtcggcgtgcggcggcggcggggaagcggggcccgcgggtccctccggccgcggggggctggcgggccgggccccggccagccccgggacggccgccaggtcgccgtcgaagccctcggccagcgcctccaggatcccgcggcaggcggccaggcactcgacggccacgcggccggcctgggcgcggcgcccggcgtcgtcgtcggcgtcggcgtggcgggcggcgtcggggtcgtcgccccccgcgggggaggcgggcgcggcggacagccgccccagggcggcgaggatccccgcggcgccgtacccggcgggcaccgcgcgctcgcccggtgcggcggcggcgacggcggcgaccccctcgtcatctgcgccggcgccggggctccccgcggcccccgtcagcgccgcgttctcgcgcgccaacaggggcgcgtaggcgcggcgcaggctggtcagcaggaagcccttctgcgcgcggtcgtatcggcggctcatggccacggcggccgccgcgtgcgccaggccccagccgaagcggccggccgccatggcgtagcccaggtggggcacggcccgcgccacgctgccggtgatgaaggagctgctgttgcgcgcggcgcccgagatccggaagcaggcctggtccagcgccacgtccccggggaccacgcgcgggttctggagccaccccatggcctccgcgtccggggtgtacagcagccgcgtgatcagggcgtactgctgcgcggcgtcgcccagctcgggcgcccacacggccgccggggcgcccgaggcctcgaaccggcgtcgcgcctcctccgcctcgggcgccccccagaggcccgggcggctgtcgcccaggccgccgtacagcacccgccccgggggcgggggcccggcgccgggccacggctccccgctgacgtacccgtcgcgatagcgcgcgtagaaggcgccggaggccgcgtcggcgtccagctcgacccgccggggctgcccggccgtgaagcggcccgtggcgtcgcggccggccaccgccgcgcgggcccggcggcgctcgatgcggcccgcggaggccgcgggggtcctcgccgccgcccggggcttgggcgcggcctcggagagggggggtggcccgggcgggggcggcgtccgcccgggggctgccggcgccgcgctcgacggaccccgcccgacggcccgcgcctcgcgtgcgtggtcggccgcgtcgttgccgtcgtcgtcctcgtcctcgtcggacgacgaggacgaagaggatgcggacgacgaggacgaggacccggagtccgacgaggtcgatgacgccgatggccgccaccggccgtgacgacgtctccgcggcggctgggccggcgggcgcggcgacaggcggtccgtggggtccggatacgcgccgcgtagcggggcctcccgttcgcggccccgggccggggcccggtcgccggcggcgtcggctgcgtcgtcgtactcgtccccgtcatcgtcgtcggctcgaaaggcgggggtccggggcggcgaggccgcggggtcgggcgtcgggatcgtccggacggcctcctctaccatggaggccagcagagccagctgtcgcggcgagacggcgtccccggcgtcctcgccggcgtcggtgcccgccgcgggggccctcccgtcccgccgggcgtcgtcgaggtcgtgggggtggtcggggtcgtggtcggggtcgtccccgccctcctccgtctccgcgccccacccgagggccccccgctcgtcgcggtctgggctcggggtgggcggcggcccgtcggtggggcccggggagccggggcgctgcttgttctccgacgccatcgccgatgcggggcgatcctccggggatacggctgcgacggcggacgtagcacggtaggtcacctacggactctcgatggggggagggggcgagacccacggaccccgacgacccccgccgtcgacgcggaactagcgcggaccggtcgatgcttgggtgggaaaaaggacagggacggccgatccccctcccgcgcttcgtccgcgtatcggcgtcccggcgcggcgagcgtctgacggtctgtctctggcggtcccgcgtcgggtcgtggatccgtgtcggcagccgcgctccgtgtggacgatcggggcgtcctcgggctcatatagtcccaggggccggcgggaaggaggagcagcggaggccgccggccccccgcccccccggcgggcccaccccgaacggaattccattatgcacgaccccgccccgacgccggcacgccgggggcccgtggccgcggcccgttggtcgaacccccggccccgcccatccgcgccatctgccatgggcggggcgcgagggcgggtgggtccgcgccccgccccgcatggcatctcattaccgcccgatccggcggtttccgcttccgttccgcatgctaacgaggaacgggcagggggcggggcccgggccccgacttcccggttcggcggtaatgagatacgagccccgcgcgcccgttggccgtccccgggccccccggtcccgcccgccggacgccgggaccaacgggacggcgggcggcccaagggccgcccgccttgccgcccccccattggccggcgggcgggaccgccccaagggggcggggccgccgggtaaaagaagtgagaacgcgaagcgttcgcacttcgtcccaatatatatatattattagggcgaagtgcgagcactggcgccgtgcccgactccgcgccggccccgggggcgggcccgggcggcggggggcgggtctctccggcgcacataaaggcccggcgcgaccgacgcccgcagacggcgccggccacgaacgacgggagcggctgcggagcacgcggaccgggagcgggagtcgcagagggccgtcggagcggacggcgtcggcatcgcgacgccccggctcgggatcgggatcgcatcggaaagggacacgcggacgcgggggggaaagacccgcccaccccacccacgaaacacaggggacgcaccccgggggcctccgacgacagaaacccaccggtccgccttttttgcacgggtaagcaccttgggtgggcggaggagggggggacgcgggggcggaggaggggggacgcgggggcggaggaggggggacgcgggggcggaggaggggggacgcgggggcggaggaggggggacgcgggggcggaggagggggctcacccgcgttcgtgccttcccgcaggaggaacgtcctcgtcgaggcgaccggcggcgaccgttgcgtggaccgcttcctgctcgtcgggcggggggaagccactgtggtcctccgggacgttttctggatggccgacatttccccaggcgcttttgcgccttgtgtaaaagcgcggcgtcccgctctccgatccccgcccctgggcacgcgcaagcgcaagcgcccttcccgccccctctcatcggagtctgaggtagaatccgatacagccttggagtctgaggtcgaatccgagacagcatcggattcgaccgagtctggggaccaggatgaagccccccgcatcggtggccgtagggccccccggaggcttggggggcggttttttctggacatgtcggcggaatccaccacggggacggaaacggatgcgtcggtgtcggacgaccccgacgacacgtccgactggtcttatgacgacattcccccacgacccaagcgggcccgggtaaacctgcggctcacgagctctcccgatcggcgggatggggttatttttcctaagatggggcgggtccggtctacccgggaaacgcagccccgggcccccaccccgtcggccccaagcccaaatgcaatgctacggcgctcggtgcgccaggcccagaggcggagcagcgcacgatggacccccgacctgggctacatgcgccagtgtatcaatcagctgtttcgggtcctgcgggtcgcccgggacccccacggcagtgccaaccgcctgcgccacctgatacgcgactgttacctgatgggatactgccgagcccgtctggccccgcgcacgtggtgccgtttgctgcaggtgtccggcggaacctggggcatgcacctgcgcaacaccatacgggaggtggaggctcgattcgacgccaccgcggaacccgtgtgcaagcttccttgtttggagaccagacggtacggcccggagtgtgatcttagtaatctcgagattcatctcagcgcgacaagcgatgatgaaatctccgatgccaccgatctggaggccgccggttcggaccacacgctcgcgtcccagtccgacacggaggatgccccctcccccgttacgctggaaaccccagaaccccgcgggtccctcgctgtgcgtctggaggatgagtttggggagtttgactggaccccccaggagggctcccagccctggctgtctgcggtcgtggccgataccagctccgtggaacgcccgggcccatccgattctggggcgggtcgcgccgcagaagaccgcaagtgtctggacggctgccggaaaatgcgcttctccaccgcctgcccctatccgtgcagcgacacgtttctccggccgtgagtccggtcgccccgacccccttgtatgtccccaaaataaaagaccaaaatcaaagcgtttgtcccagcgtcttaatggcgggaagggcggagagaaacagaccacgcggacatggggggtgtttgggggtttattggcaccgggggctaaagggtggtaaccggatagcagatgtgaggaagtcggggccgttcgccgcgaacggcgatcagagggtcagtttcttgcggaccacggcccggcgatgtgggttgctcgtctgggacctcgggcatgcccatacacgcacaacacggacgccgcaccggatgggacgtcgtaagggggcctggggtagctgggtggggtttgtgcagagcaatcagggaccgcagccagcgcatacaatcgcgctcccgtccgtttgtcccgggcagtaccacgccgtactggtattcgtaccggctgagcagggtctccagggggtggttgggggccgcggggaacggggtccacgccacggtccactcgggcaaaaaccgagtcggcacggcccacggttctcccacccacgcgtctggggtcttgatggcgataaatcttaccccgagccggattttttgggcgtattcgagaaacggcacacacagatccgccgcgcctaccacccacaagtggtagaggcgaggggggctgggttggtctcggtgcagcagtcggaagcacgccacggcgtccacgacctcggtgctctccaaggggctgtcctccgcaaacaggcccgtggtggtgtttggggggcagcgacaggacctagtgcgcacgatcgggcgggtgggtttgggtaagtccatcagcggctcggccaaccgtcgaaggttggccggacgaacgacgaccggggtacccaggggttctgatgccaaaatgcggcactgcctaagcaggaagctccacagggccgggcttgcgtcgacggaagtccggggcagggcgttgttctggtcaaggagggtcattacgttgacgacaacaacgcccatgttggtatattacaggcccgtgtccgatttggggcacttgcagatttgtaaggccacgcacggcggggagacaggccgacgcgggggctgctctaaaaatttaagggccctacggtccacagacccgccttcccgggggggcccttggagcgaccggcagcggaggcgtccgggggaggggagggtgatttacgggggggtaggtcagggggtgggtcgtcaaactgccgctccttaaaaccccggggcccgtcgttcggggtgctcgttggttggcactcacggtgcggcgaatggcctgtcgtaagttttgtcgcgtttacgggggacagggcaggaggaaggaggaggccgtcccgccggagacaaagccgtcccgggtgtttcctcatggccccttttataccccagccgaggacgcgtgcctggactccccgcccccggagacccccaaaccttcccacaccacaccacccagcgaggccgagcgcctgtgtcatctgcaggagatccttgcccagatgtacggaaaccaggactaccccatagaggacgaccccagcgcggatgccgcggacgatgtcgacgaggacgccccggacgacgtggcctatccggaggaatacgcagaggagctttttctgcccggggacgcgaccggtccccttatcggggccaacgaccacatccctcccccgtgtggcgcatctccccccggtatacgacgacgcagccgggatgagattggggccacgggatttaccgcggaagagctggacgccatggacagggaggcggctcgagccatcagccgcggcggcaagcccccctcgaccatggccaagctggtgactggcatgggctttacgatccacggagcgctcaccccaggatcggaggggtgtgtctttgacagcagccatccagattacccccaacgggtaatcgtgaaggcggggtggtacacgagcacgagccacgaggcgcgactgctgaggcgactggaccacccggcgatcctgcccctcctggacctgcatgtcgtctccggggtcacgtgtctggtcctccccaagtaccaggccgacctgtatacctatctgagtaggcgcctgaacccactgggacgcccgcagatcgcagcggtctcccggcagctcctaagcgccgttgactacattcaccgccagggcattatccaccgcgacattaagaccgaaaatatttttattaacacccccgaggacatttgcctgggggactttggcgccgcgtgcttcgtgcagggttcccgatcaagccccttcccctacggaatcgccggaaccatcgacaccaacgcccccgaggtcctggccggggatccgtataccacgaccgtcgacatttggagcgccggtctggtgatcttcgagactgccgtccacaacgcgtccttgttctcggccccccgcggccccaaaaggggcccgtgcgacagtcagatcacccgcatcatccgacaggcccaggtccacgttgacgagttttccccgcatccagaatcgcgcctcacctcgcgctaccgctcccgcgcggccgggaacaatcgcccgccgtacacccgaccggcctggacccgctactacaagatggacatagacgtcgaatatctggtttgcaaagccctcaccttcgacggcgcgcttcgccccagcgccgcagagctgctttgtttgccgctgtttcaacagaaatgaccgccccctgggggcggtgctgtttgcgggttggcacaaaaagaccccgatccgcgtctgtggtgtttttggcatcatgtcgcagggcgccatgcgtgccgttgttcccattatcccattccttttggttcttgtcggtgtatcgggggttcccaccaacgtctcctccaccacccaaccccaactccagaccaccggtcgtccctcgcatgaagcccccaacatgacccagaccggcaccaccgactctcccaccgccatcagccttaccacgcccgaccacacaccccccatgccaagtattggactggaggaggaggaagaggaggagggggccggggacggcgaacatcttgaggggggagatgggacccgtgacaccctaccccagtccccgggcccagccttcccgttggctgaggacgtcgagaaggacaaacccaaccgtcccgtagtcccatcccccgatcccaacaactcccccgcgcgccccgagaccagtcgcccgaagacaccccccaccattatcgggccgctggcaactcgccccacgacccgactcacctcaaagggacgacccttggttccgacgcctcaacataccccgctgttctcgttcctcactgcctcccccgccctggacaccctcttcgtcgtcagcaccgtcatccacaccttatcgtttttgtgtattggtgcgatggcgacacacctgtgtggcggttggtccagacgcgggcgacgcacacaccctagcgtgcgttacgtgtgcctgccgtccgaacgcgggtagggtatggggcgggggatggggagagcccacatgcggaaagcaagaacaataaaggcggtggtatctagttgatatgcatctctgggtgtttttggggtgtggcggacgcggggcggtcattggacggggtgcagttaaatacatgcccgggacccatgaagcatgcgcgacttccgggcctcagaacccacccgaaacggccaacggacgtctgagccaggcctggctatccggagaaacagcacacgacttggcgttctgtgtgtcgcgatgtctctgcgcgcagtctggcatctggggcttttgggaagcctcgtgggggctgttcttgccgccacccatcggggacctgcggccaacacaacggaccccttaacgcacgccccagtgtcccctcaccccagccccctggggggctttgccgtccccctcgtagtcggtgggctgtgcgccgtagtcctgggggcggcatgtctgcttgagctcctgcgtcgtacgtgccgcgggtgggggcgttaccatccctacatggacccagttgtcgtataatttcccccccccccccccttctccgcgtgggtgatgtcgggtccaaactcccgacaccaccagctggcatggtataaatcaccggtgcgccccccaaaccatgtccggcagggggatgggggggcgaatgcggagggcacccaacaacaccgggctaaccaggaaatccgtggccccggcccccaataaagatcgcggtagcccggccgtgtgacactatcgtccataccgaccacaccgacgaatcccccaagggggaggggccattttacgaggaggaggggtataacaaagtctgtctttaaaaagcaggggttagggagttgttcggtcataagcttcagcgcgaacgaccaactaccccgatcatcagttatccttaaggtctcttttgtgtggtgcgttccggtatggggggggctgccgccaggttgggggccgtgattttgtttgtcgtcatagtgggcctccatggggtccgcggcaaatatgccttggtggatgcctctctcaagatggccgaccccaatcgctttcgcggcaaagaccttccggtcctggaccagctgaccgaccctccgggggtccggcgcgtgtaccacatccaggcgggcctaccggacccgttccagccccccagcctcccgatcacggtttactacgccgtgttggagcgcgcctgccgcagcgtgctcctaaacgcaccgtcggaggccccccagattgtccgcggggcctccgaagacgtccggaaacaaccctacaacctgaccatcgcttggtttcggatgggaggcaactgtgctatccccatcacggtcatggagtacaccgaatgctcctacaacaagtctctgggggcctgtcccatccgaacgcagccccgctggaactactatgacagcttcagcgccgtcagcgaggataacctggggttcctgatgcacgcccccgcgtttgagaccgccggcacgtacctgcggctcgtgaagataaacgactggacggagattacacagtttatcctggagcaccgagccaagggctcctgtaagtacgccctcccgctgcgcatccccccgtcagcctgcctctccccccaggcctaccagcagggggtgacggtggacagcatcgggatgctgccccgcttcatccccgagaaccagcgcaccgtcgccgtatacagcttgaagatcgccgggtggcacgggcccaaggccccatacacgagcaccctgctgcccccggagctgtccgagacccccaacgccacgcagccagaactcgccccggaagaccccgaggattcggccctcttggaggaccccgtggggacggtggcgccgcaaatcccaccaaactggcacataccgtcgatccaggacgccgcgacgccttaccatcccccggccaccccgaacaacatgggcctgatcgccggcgcggtgggcggcagtctcctggcagccctggtcatttgcggaattgtgtactggatgcgccgccacactcaaaaagccccaaagcgcatacgcctcccccacatccgggaagacgaccagccgtcctcgcaccagcccttgttttactagatacccccccttaatgggtgcgggggggtcaggtctgcggggttgggatgggaccttaactccatataaagcgagtctggaaggggggaaaggtggacagtcgataagtcggtagcgggggacgcgcacctgttccgcctgtcgcacccacagctttttttgcgaaccgtcccgttccgggatgccgtgccgcccgttgcagggcctggtgctcgtgggcctctgggtctgtgccaccagcctggttgtccgtggccccacggtcagtctggtatcaaactcatttgtggacgccggggccttggggcccgacggcgtagtggaggaagacctgcttattctcggggagcttcgctttgtgggggaccaggtcccccacaccacctactacgatgggggcgtagagctgtggcactaccccatgggacacaaatgcccacgggtcgtgcatgtcgtcacggtgaccgcgtgcccacgtcgccccgccgtggcattcgccctgtgtcgcgcgaccgacagcactcacagccccgcatatcccaccctggagctcaatctggcccaacagccgcttttgcgggtccagagggcaacgcgggactatgccggggtgtacgtgttacgcgtatgggtcggtgacgcgccaaacgccagcctgtttgtcctggggatggccatagccgccgaagggactctggcgtacaacggctcggcctatggctcctgcgacccgaaactgcttccgtcttcggccccgcgtctggccccggcgagcgtataccaacccgcccctaaccaggcctccaccccctcgaccaccacctccaccccctcgaccaccatccccgctccctcgaccaccatccccgctccccaagcatcgaccacgcccttccccacgggagatccaaaaccacaacctcccggggtcaaccacgaacccccatctaatgccacgcgagcgacccgcgactcgcgatacgcgctaacggtgacccagataatccagatagccatccccgcgtccatcatagccctggtgtttctggggagctgtatttgctttatacacagatgtcaacgccgctaccgacgctcccgtcgcccgatttacagcccccagatgcccacgggcatctcatgcgcggtgaacgaagcggccatggcccgcctcggagccgagctcaaatcgcatccgagcaccccccccaaatcccggcgccggtcgtcacgcacgccaatgccctccctgacggccatcgccgaagagtcggagcccgctggggcggctgggcttccgacgccccccgtggaccccacgacacccaccccaacgcctcccctgttggtataggtccacggccactggccgggagcaccacataaccgaccgcagtccctgagttgggaataaaccggtattatttacctatatccgtgtatgtcgatttctttccccccctccccggaaaccaaagaaggaagcaaagaatggatgggaggagttcaggaagccggggagagggcccgcggcgcatttaaggcgttgttgtgttgactttgcctcttctggcgggttggtgcggtgctgtttgttgggctcccattttacccgaagatcggctgctatccccgggacatggatcgcggggcggtggtggggtttcttctcggtgtttgtgttgtatcgtgcttggcgggaacgcccaaaacgtcctggagacgggtgagtgtcggcgaggacgtttcgttgcttccagctccggggcctacggggcgcggcccgacccagaaactactatgggccgtggaacccctggatgggtgcggccccttacacccgtcgtgggtctcgctgatgccccccaagcaggtgcccgagacggtcgtggatgcggcgtgcatgcgcgctccggtcccgctggcgatggcgtacgcccccccggccccatctgcgaccgggggtctacgaacggacttcgtgtggcaggagcgcgcggccgtggttaaccggagtctggttattcacggggtccgagagacggacagcggcctgtataccctgtccgtgggcgacataaaggacccggctcgccaagtggcctcggtggtcctggtggtgcaaccggccccagttccgaccccacccccgaccccagccgattacgacgaggatgacaatgacgagggcgaggacgaaagtctcgccggcactcccgccagcgggaccccccggctcccgcctccccccgcccccccgaggtcttggcccagcgcccccgaagtctcacatgtgcgtggggtgaccgtgcgtatggagactccggaagctatcctgttttcccccggggagacgttcagcacgaacgtctccatccatgccatcgcccacgacgaccagacctactccatggacgtcgtctggttgaggttcgacgtgccgacctcgtgtgccgagatgcgaatatacgaatcgtgtctgtatcacccgcagctcccagaatgtctgtccccggccgacgcgccgtgcgccgcgagtacgtggacgtctcgcctggccgtccgcagctacgcggggtgttccagaacaaaccccccaccgcgctgttcggccgaggctcacatggagcccgtcccggggctggcgtggcaggcggcctccgtcaatctggagttccgggacgcgtccccacaacactccggcctgtatctgtgtgtggtgtacgtcaacgaccatattcacgcctggggccacattaccatcagcaccgcggcgcagtaccggaacgcggtggtggaacagcccctcccacagcgcggcgcggatttggccgagcccacccacccgcacgtcggggcccctccccacgcgcccccaacccacggcgccctgcggttaggggcggtgatgggggccgccctgctgctgtctgcactggggttgtcggtgtgggcgtgtatgacctgttggcgcaggcgtgcctggcgggcggttaaaagcagggcctcgggtaaggggcccacgtacattcgcgtggccgacagcgagctgtacgcggactggagctcggacagcgagggagaacgcgaccaggtcccgtggctggcccccccggagagacccgactctccctccaccaatggatccggctttgagatcttatcaccaacggctccgtctgtatacccccgtagcgatgggcatcaatctcgccgccagctcacaacctttggatccggaaggcccgatcgccgttactcccaggcctccgattcgtccgtcttctggtaaggcgccccatcccgaggccccacgtcggtcgccgaactgggcgaccgccggcgaggtggacgtcggagacgagctaatcgcgatttccgacgaacgcggacccccccgacatgaccgcccgcccctcgccacgtcgaccgcgccctcgccacacccgcgacccccgggctacacggccgttgtctccccgatggccctccaggctgtcgacgccccctccctgtttgtcgcctggctggccgctcggtggctccggggggcttccggcctgggggccgtcctgtgtgggattgcgtggtatgtgacgtcaattgcccgaggcgcataaagggccggtggtccgcctagccgcagcaaattaaaaatcgtgagtcacagcgaccgcaacttcccacccggagctttcttccggcctcgatgacgtcccggctctccgatcccaactcctcagcgcgatccgacatgtccgtgccgctttatcccacggcctcgccagtttcggtcgaagcctactactcggaaagcgaagacgaggcggccaacgacttcctcgtacgcatgggccgccaacagtcggtattaaggcgtcgacgcagacgcacccgctgcgtcggcatggtgatcgcctgtctcctcgtggccgttctgtcgggcggatttggggcgctcctgatgtggctgctccgctaaaagaccgcatcgacacgcgcgtccttcttgtcgtctctcttcccccccatcaccccgcaatttgcacccagcctttaactacattaaattgggttcgattggcaatgttgtctcccggttgatttttgggtgggtggggagtgggtgggtggggagtgggtgggtggggagtgggtgggtggggagtgggtgggtggggagtgggtgggtggggagtgggtgggtggggagtgggtgggtggggagtgggtgggtggggagtgggtgggtggggagtggcaaggaagaaacaagcccgaccaccagacagaaaatgtaaccatacccaaaccgactctgggggctgtttgtggggtcggaaccataggatgaacaaaccaccccgtaccacccgcacccaagggtgcgggtggctcatcggcatctgtccggtatgggttgttccccacccactcgcgttcggacgtcttagaatcatggcggttttctatgccgacatcggttttctcccccgcaataagacacgatgcgataaaatctgtttgtaaaatttattaagggtacaaattgccctagcacaggggtggggttagggccgggtccccacacccaaacgcaccaaacagatgcaggcagtgggtcgagtacagccccgcgtacgaacacgtcgatgcgtgtgtcagacagcaccagaaagcacaggccatcaacaggtcgtgcatgtgtcggtgggtttggacgcggggggccatggtggtgataaagttaatggccgccgtccgccagggccacaggggcgacgtctcttggttggcccggagccactgggtgtggaccagccgcgcgtggcggcccaacatggcccctgtagccgggggcgggggatcgcgcacgtttgcagcgcacatgcgagacacctcgaccacggttcgaaagaaggcccggtggtccgcgggcaacatcaccaggtgcgcaagcgcccgggcgtccagagggtagagccctgagtcatccgaggttggctcatcgcccgggtcttgccgcaagtgcgtgtgggttgggcttccggtgggcgggacgcgaaccgcggtgtggatcccgacgcgggcccgagcgtatgctccatgttgtggggagaaggggtctgggctcgccaggggggcatacttgcccgggctatacagacccgcgagccgtacgtggttcgcggggggtgcgtggggtccggggctcccggggagaccggggctcccggggagaccggggctccctgggagaccggggttgtcgtggatccctggggtcacgcggtaccctggggtctctgggagctcgcggtactctgggttccctaggttctcggggtggtcgcggaacccggggctcccggggaacacgcggtgtcctggggattgttggcggtcggacggcttcagatggcttcgagatcgtagtgtccgcaccgactcgtagtagacccgaatctccacattgccccgccgcttgatcattatcaccccgttgcgggggtccggagatcatgcgcgggtgtcctcgaggtgcgtgaacacctctggggtgcatgccggcggacggcacgccttttaagtaaacatctgggtcgcccggcccaactggggccgggggttgggtctggctcatctcgagagccacgggggggaaccaccctccgcccagagactcgggtgatggtcgtacccgggactcaacgggttaccggattacggggactgtcggtcacggtcccgccggttcttcgatgtgccacacccaaggatgcgttgggggcgatttcgggcagcagcccgggagagcgcagcaggggacgctccgggtcgtgcacggcggttctggccgcctcccggtcctcacgcccccttttattgatctcatcgctcccccccgacgagcaggaagcggtccacgcaacggtcgccgccggtcgcctcgacgaggacgttcctcctgcgggaaggcacgaacgcgggtgagccccctcctccgcccccgcgtcccccctcctccgcccccgcgtcccccctcctccgcccccgcgtcccccctcctccgcccccgcgtcccccctcctccgcccccgcgtccccccctcctccgcccacccaaggtgcttacccgtgcaaaaaaggcggaccggtgggtttctgtcgtcggaggcccccggggtgcgtcccctgtgtttcgtgggtggggtgggcgggtctttcccccccgcgtccgcgtgtccctttccgatgcgatcccgatcccgagccggggcgtcgcgatgccgacgccgtccgctccgacggccctctgcgactcccgctcccggtccgcgtgctccgcagccgctcccgtcgttcgtggccggcgccgtctgcgggcgtcggtcgcgccgggcctttatgtgcgccggagagacccgccccccgccgcccgggcccgcccccggggccggcgcggagtcgggcacggcgccagtgctcgcacttcgccctaataatatatatatattgggacgaagtgcgaacgcttcgcgttctcacttcttttacccggcggccccgcccccttggggcggtcccgcccgccggccaatgggggggcggcaaggcgggcggcccttgggccgcccgccgtcccgttggtcccggcgtccggcgggcgggaccggggggcccggggacggccaacgggcgcgcggggctcgtatctcattaccgccgaaccgggaagtcggggcccgggccccgccccctgcccgttcctcgttagcatgcggaacggaagcggaaaccgccggatcgggcggtaatgagatgccatgcggggcggggcgcggacccacccgccctcgcgccccgcccatggcagatggcgcggatgggcggggccgggggttcgaccaacgggccgcggccacgggcccccggcgtgccggcgtcggggcggggtcgtgcataatggaattccgttcggggtgggcccgccgggggggcggggggccggcggcctccgctgctcctccttcccgccggcccctgggactatatgagcccgaggacgccccgatcgtccacacggagcgcggctgccgacacggatccacgacccgacgcgggaccgccagagacagaccgtcagacgctcgccgcgccgggacgccgatacgcggacgaagcgcgggagggggatcggccgtccctgtcctttttcccacccaagcatcgaccggtccgcgctagttccgcgtcgacggcgggggtcgtcggggtccgtgggtctcgccccctccccccatcgagagtccgtaggtgacctaccgtgctacgtccgccgtcgcagccgtatccccggaggatcgccccgcatcggcgatggcgtcggagaacaagcagcgccccggctccccgggccccaccgacgggccgccgcccaccccgagcccagaccgcgacgagcggggggccctcgggtggggcgcggagacggaggagggcggggacgaccccgaccacgaccccgaccacccccacgacctcgacgacgcccggcgggacgggagggcccccgcggcgggcaccgacgccggcgaggacgccggggacgccgtctcgccgcgacagctggctctgctggcctccatggtagaggaggccgtccggacgatcccgacgcccgaccccgcggcctcgccgccccggacccccgcctttcgagccgacgacgatgacggggacgagtacgacgacgcagccgacgccgccggcgaccgggccccggcccggggccgcgaacgggaggccccgctacgcggcgcgtatccggaccccacggaccgcctgtcgccgcgcccgccggcccagccgccgcggagacgtcgtcacggccggtggcggccatcggcgtcatcgacctcgtcggactccgggtcctcgtcctcgtcgtccgcatcctcttcgtcctcgtcgtccgacgaggacgaggacgacgacggcaacgacgcggccgaccacgcacgcgaggcgcgggccgtcgggcggggtccgtcgagcgcggcgccggcagcccccgggcggacgccgcccccgcccgggccaccccccctctccgaggccgcgcccaagccccgggcggcggcgaggacccccgcggcctccgcgggccgcatcgagcgccgccgggcccgcgcggcggtggccggccgcgacgccacgggccgcttcacggccgggcagccccggcgggtcgagctggacgccgacgcggcctccggcgccttctacgcgcgctatcgcgacgggtacgtcagcggggagccgtggcccggcgccgggcccccgcccccggggcgggtgctgtacggcggcctgggcgacagccgcccgggcctctggggggcgcccgaggcggaggaggcgcgacgccggttcgaggcctcgggcgccccggcggccgtgtgggcgcccgagctgggcgacgccgcgcagcagtacgccctgatcacgcggctgctgtacaccccggacgcggaggccatggggtggctccagaacccgcgcgtggtccccggggacgtggcgctggaccaggcctgcttccggatctcgggcgccgcgcgcaacagcagctccttcatcaccggcagcgtggcgcgggccgtgccccacctgggctacgccatggcggccggccgcttcggctggggcctggcgcacgcggcggccgccgtggccatgagccgccgatacgaccgcgcgcagaagggcttcctgctgaccagcctgcgccgcgcctacgcgcccctgttggcgcgcgagaacgcggcgctgacgggggccgcggggagccccggcgccggcgcagatgacgagggggtcgccgccgtcgccgccgccgcaccgggcgagcgcgcggtgcccgccgggtacggcgccgcggggatcctcgccgccctggggcggctgtccgccgcgcccgcctcccccgcggggggcgacgaccccgacgccgcccgccacgccgacgccgacgacgacgccgggcgccgcgcccaggccggccgcgtggccgtcgagtgcctggccgcctgccgcgggatcctggaggcgctggccgagggcttcgacggcgacctggcggccgtcccggggctggccggggcccggcccgccagccccccgcggccggagggacccgcgggccccgcttccccgccgccgccgcacgccgacgcgccccgcctgcgcgcgtggctgcgcgagctgcggttcgtgcgcgacgcgctggtgctcatgcgcctgcgcggggacctgcgcgtggccggcggcagcgaggccgccgtggccgccgtgcgcgccgtgagcctggtcgccggggccctgggccccgcgctgccgcgggacccgcgcctgccgagctccgcggccgccgccgccgcggacctgctgtttgacaaccagagcctgcgccccctgctggcggcggcggccagcgcaccggacgccgccgacgcgctggcggccgccgccgcctccgccgcgccgcgggaggggcgcaagcgcaagagtcccggcccggcccggccgcccggaggcggcggcccgcgacccccgaagacgaagaagagcggcgcggacgcccccggctcggacgcccgcgcccccctccccgcgcccgcgcccccctccacgcccccggggcccgagcccgcccccgcccagcccgcggcgccccgggccgccgcggcgcaggcccgcccgcgccccgtggcgctgtcgcgccggcccgccgagggccccgaccccctgggcggctggcggcggcagcccccggggcccagccacacggcggcgcccgcggccgccgccctggaggcctactgctccccgcgcgccgtggccgagctcacggaccacccgctgttccccgtcccctggcgaccggccctcatgtttgacccgcgggccctggcctcgatcgccgcgcggtgcgccgggcccgcccccgccgcccaggccgcgtgcggcggcggcgacgacgacgataacccccacccccacggggccgccgggggccgcctctttggccccctgcgcgcctcgggcccgctgcgccgcatggcggcctggatgcgccagatccccgaccccgaggacgtgcgcgtggtggtgctgtactcgccgctgccgggcgaggacctggccggcggcggggcctcgggggggccgccggagtggtccgccgagcgcggcgggctgtcctgcctgctggcggccctggccaaccggctgtgcgggccggacacggccgcctgggcgggcaactggaccggcgcccccgacgtgtcggcgctgggcgcacagggcgtgctgctgctgtccacgcgggacctggccttcgccggggccgtggagtttctggggctgctcgccagcgccggcgaccggcggctcatcgtggtcaacaccgtgcgcgcctgcgactggcccgccgacgggcccgcggtgtcgcggcagcacgcctacctggcgtgcgagctgctgcccgccgtgcagtgcgccgtgcgctggccggcggcgcgggacctgcgccgcacggtgctggcctcgggccgcgtgttcggcccgggggtcttcgcgcgcgtggaggccgcgcacgcgcgcctgtaccccgacgcgccgccgctgcgcctgtgccgcggcggcaacgtgcgctaccgcgtgcgcacgcgcttcggcccggacacgccggtgcccatgtccccgcgcgagtaccgccgggccgtgctgccggcgctggacggccgggcggcggcctcggggaccaccgacgccatggcgcccggcgcgccggacttctgcgaggaggaggcccactcgcaccgcgcctgcgcgcgctggggcctgggcgcgccgctgcggcccgtgtacgtggcgctggggcgcgaggcggtgcgcgccggcccggcccggtggcgcgggccgcggagggacttttgcgcccgcgccctgctggagcccgacgacgacgcccccccgctggtgctgcgcggcgacgacgacggcccgggggccctgccgccggcgccgcccgggattcgctgggcctcggccacgggccgcagcggcaccgtgctggcggcggcgggggccgtggaggtgctgggggcggaggcgggcttggccacgcccccgcggcgggaagttgtggactgggaaggcgcctgggacgaagacgacggcggcgcgttcgagggggacggggtgctgtaacgggccgggacggggcggggcgcttgtgagacccgaagacgcaataaacggcaacaacctgattaagttttgcagtagcgttgtttattcgaggggcgggagggggcgaggggcgggagggggcgaggggcgggagggggcgaggggcgggagggggcgaggggcgggagggggcgaggggcgggagggggcgaggggcgggagggggcgaggggcgggagggggcgaggggcgggagggggcgaggggcgggagggggcgaggggcgggagggggcgaggggcgggagggggcgaggggcgggagggggcgaggggcgggagggggcgaggggcgggagggggcgaggggcgggagggggcgaggggcgggagggggcgaggggcgggagggggcgaggggcgggagggggcgaggggcggtggtggtgcgcgggcgcccccggagggtttggatctctgacctgagattggcggcactgaggtagagatgcccgaacccccccgagggagcgcgggacgcggccggggagggctggggccggggagggctggggccggggagggctggggccggggagggctggggccggggagggctggggccggggagggctggggccggggagggctggggccggggagggctggggctggggaggggcggtggtgtgtagcaggagcggtgtgttgcgccggggtacgtctggaggagcgggaggtgcgcggtgacgtgtggatgaggaacaggagttgttgcgcggtgagttgtcgctgtgagttgtgttgttgggcaggtgtggtggatgacgtgacgtgtgacgtgcggagtgcgccgtgctctgttggtttcacctgtggcagcccgggccccccgcgggcgcgcgcgcgcgcaaaaaaggcgggcggcggtccgggcggcgtgcgcgcgcgcggcgggcgtggggggcggggccgcgggagcggggggaggagcggggggaggagcggggggaggagcggggggaggagcggggggaggagcggggggaggagcggggggaggagcggggggaggagcggggggaggagcggggggaggagcggggggaggagcggggggaggagcggggggaggagcggggggaggagcggggggaggagcggggggaggagcggggggaggagcggggggaggagcggccagaccccgaaaacgggccccccccaaaacacaccccccgggggtcgcgcgcggccctttaaagcggcggcggcgggc
